(19) United States
(12) Patent Application Publication
(10) Pub. No.: US 2024/0368574 A1
(43) Pub. Date: Nov. 7, 2024

(54) DUAL CONTROLS FOR THERAPEUTIC CELL ACTIVATION OR ELIMINATION

(71) Applicant: Board of Regents of The University of Texas System, Austin, TX (US)

(72) Inventors: Joseph Henri Bayle, Houston, TX (US); MyLinh Thi Duong, Houston, TX (US); Matthew Robert Collinson-Pautz, Houston, TX (US); Aaron Edward Foster, Houston, TX (US); David Michael Spencer, Houston, TX (US)

(21) Appl. No.: 18/471,761

(22) Filed: Sep. 21, 2023

Related U.S. Application Data
(63) Continuation of application No. 17/219,116, filed on Mar. 31, 2021, now abandoned.
Application No. 17/219,116 is a division of application No. 15/377,776, filed on Dec. 13, 2016, now abandoned.
(60) Provisional application No. 62/267,277, filed on Dec. 14, 2015.

(51) Int. Cl. C12N 9/64; A61K 35/17; A61K 38/00; A61K 39/00; C07K 14/47; C07K 14/705; C12N 5/0783; C12N 9/12; C12N 9/90

(52) U.S. Cl. CPC C12N 9/6472; A61K 35/17; A61K 39/0005; C07K 14/4705; C07K 14/70578; C12N 5/0636; C12N 9/12; C12N 9/90; C12Y 207/11001; C12Y 304/22062; C12Y 502/01008; A61K 38/00; A61K 2039/515; A61K 2039/57; C07K 2319/70; C12N 2510/00

(57) ABSTRACT

The technology relates in part to methods for controlling the activity or elimination of therapeutic cells using molecular switches that employ distinct heterodimerizer ligands, in conjunction with other multimeric ligands. The technology may be used, for example to activate or eliminate cells used to promote engraftment, to treat diseases or condition, or to control or modulate the activity of therapeutic cells that express chimeric antigen receptors or recombinant T cell receptors.

### RELATED APPLICATIONS

[0001] This application is a continuation of U.S. Application No. 17/219,116, filed Mar. 31, 2021, which is a divisional of U.S. application Ser. No. 15/377,776, filed Dec. 13, 2016, which claims the benefit of priority to U.S. Application No. 62/267,277, filed Dec. 14, 2015, the entire content of each of which is incorporated herein by reference.

### SEQUENCE LISTING

[0002] This application contains a computer readable Sequence Listing which has been submitted in XML file format via Patent Center, the entire content of which is incorporated by reference herein in its entirety. The Sequence Listing XML file submitted via Patent Center is entitled “14562-109-999_SEQ_LISTING.xml”, was created on Aug. 3, 2023, and is 2,779,658 bytes in size.

### FIELD

[0003] The technology relates in part to methods for controlling the activity or elimination of therapeutic cells using molecular switches that employ distinct heterodimerizer ligands, in conjunction with other multimeric ligands. The technology may be used, for example to activate or eliminate cells used to promote engraftment, to treat diseases or condition, or to control or modulate the activity of therapeutic cells that express chimeric antigen receptors or recombinant T cell receptors.

### BACKGROUND

[0004] There is an increasing use of cellular therapy in which modified or unmodified cells, such as T cells, are administered to a patient. In some examples, cells are genetically engineered to express a heterologous gene, these modified cells are then administered to patients. Heterologous genes may be used to express chimeric antigen receptors (CARs), which are artificial receptors designed to convey antigen specificity to T cells without the requirement for MHC antigen presentation. They include an antigen-specific component, a transmembrane component, and an intracellular component selected to activate the T cell and provide specific immunity. CAR-expressing T cells may be used in various therapies, including cancer therapies. These treatments are used, for example, to target tumors for elimination, and to treat cancer and blood disorders, but these therapies may have negative side effects.

[0005] In some instances of therapeutic cell-induced adverse events, there is a need for rapid and near complete elimination of the therapeutic cells. Overzealous on-target effects, such as those directed against large tumor masses, can lead to cytokine storms, associated with tumor lysis syndrome (TLS), cytokine release syndrome (CRS) or macrophage activation syndrome (MAS). As a result, there is great interest in the development of a stable, reliable “suicide gene” that can eliminate transferred T cells or stem cells in the event that they trigger serious adverse events (SAEs), or become obsolete following treatment. Yet in some instances, the need for therapy may remain, and there may be a way to reduce the negative effects, while maintaining a sufficient level of therapy.

[0006] In some instances, there is a need to increase the activity of the therapeutic cell. For example, costimulating polypeptides may be used to enhance the activation of T cells, and of CAR-expressing T cells against target antigens, which would increase the potency of adoptive immunotherapy.

[0007] Thus, there is a need for controlled activation or elimination of therapeutic cells, to rapidly enhance the activity of or to remove the possible negative effects of donor cells used in cellular therapy, while retaining part or all of the beneficial effects of the therapy.

### SUMMARY

[0008] Chemical Induction of Dimerization (CID) with small molecules is an effective technology used to generate switches of protein function to alter cell physiology. A high specificity, efficient dimerizer is rimiducid (AP1903), which has two identical, protein-binding surfaces arranged tail-to-tail, each with high affinity and specificity for a mutant or variant of FKBP12: FKBP12 (F36V) (FKBP12v36, Fᵥ₃₆ or Fᵥ), Attachment of one or more Fᵥ domains onto one or more cell signaling molecules that normally rely on homodimerization can convert that protein to rimiducid control. Homodimerization with rimiducid is used in the context of an inducible caspase safety switch, and an inducible activation switch for cellular therapy, where costimulatory polypeptides including MyD88 and CD40 polypeptides are used to stimulate immune activity. Because both of these switches rely on the same ligand inducer, it is difficult to control both functions using these switches within the same cell. In some embodiments, a molecular switch is provided that is controlled by a distinct dimerizer ligand, based on the heterodimerizing small molecule, rapamycin, or rapamycin analogs (“rapalogs”). Rapamycin binds to FKBP12, and its variants, and can induce heterodimerization of signaling domains that are fused to FKBP12 by binding to both FKBP12 and to polypeptides that contain the FKBP-rapamycin-binding (FRB) domain of mTOR. Provided in some embodiments of the present application are molecular switches that greatly augment the use of rapamycin, rapalogs and rimiducid as agents for therapeutic applications. In certain embodiments, the allele specificity of rimiducid is used to allow selective dimerization of Fᵥ-fusions. In other embodiments, a rapamycin or rapalog-inducible pro-apoptotic polypeptide, such as, for example, Caspase-9 or a rapamycin or rapalog-inducible costimulatory polypeptide, such as, for example, MyD88/CD40 (MC) is used in combination with a rimiducid-inducible pro-apoptotic polypeptide, such as, for example, Caspase-9, or a rimiducid-inducible chimeric stimulating polypeptide, such as, for example, iMC to produce dual-switches. These dual-switches can be used to control both cell proliferation and apoptosis selectively by administration of either of two distinct ligand inducers.

[0009] In other embodiments, a molecular switch is provided that provides the option to activate a pro-apoptotic polypeptide, such as, for example, Caspase-9, with either rimiducid, or rapamycin or a rapalog, wherein the chimeric pro-apoptotic polypeptide comprises both a rimiducid-induced switch and a rapamycin-, or rapalog-, induced switch. Including both molecular switches on the same chimeric pro-apoptotic polypeptide provides flexibility in a clinical setting, where the clinician can choose to administer the appropriate drug based on its specific pharmacological properties, or for other considerations, such as, for example, availability. These chimeric pro-apoptotic polypeptides may comprise, for example, both a FKBP12-Rapamycin-binding domain of mTOR (FRB), or an FRB variant, and an FKBP12 variant polypeptide, such as, for example, FKBP12v36. By FRB variant polypeptide is meant an FRB polypeptide that binds to a rapamycin analog (rapalog), for example, a rapalog provided in the present application. FRB variant polypeptides comprise one or more amino acid substitutions, bind to a rapalog, and may bind, or may not bind to rapamycin.

[0010] In one embodiment of the dual-switch technology, (Fwt.FRBΔC9/MC.FvFv) a homodimerizer, such as AP1903 (rimiducid), induces activation of a modified cell, and a heterodimerizer, such as rapamycin or a rapalog, activates a safety switch, causing apoptosis of the modified cell. In this embodiment, for example, a chimeric pro-apoptotic polypeptide, such as, for example, Caspase-9, comprising both an FKBP12 and an FRB, or FRB variant region (iFwtFRBC9) is expressed in a cell along with an inducible chimeric MyD88/CD40 costimulating polypeptide, that comprises MyD88 and CD40 polypeptides and at least two copies of FKBP12v36 (MC.FvFv). Upon contacting the cell with a dimerizer that binds to the Fᵥ regions, the MC.FvFv dimerizes or multimerizes, and activates the cell. The cell may, for example, be a T cell that expresses a chimeric antigen receptor directed against a target antigen (CARζ). As a safety switch, the cell may be contacted with a heterodimerizer, such as, for example, rapamycin, or a rapalog, that binds to the FRB region on the iFwtFRBC9 polypeptide, as well as the FKBP12 region on the iFwtFRBC9 polypeptide, causing direct dimerization of the Caspase-9 polypeptide, and inducing apoptosis. (FIG. 43 (2), FIG. 57) In another mechanism, the heterodimerizer binds to the FRB region on the iFwtFRBC9 polypeptide, and the Fᵥ region on the MC.FvFv polypeptide, causing scaffold-induced dimerization, due to the scaffold of two FKBP12v36 polypeptides on each MC.FvFv polypeptide (FIG. 43 (1)), and inducing apoptosis. By FKBP12 variant polypeptide is meant an FKBP12 polypeptide that comprises one or more amino acid substitutions and that binds to a ligand such as, for example, rimiducid, with at least 100 times, 500 times, or 1000 times more affinity than the ligand binds to the FKBP12 polypeptide region.

[0011] In another embodiment of the dual-switch technology, (FRBFwtMC/FvC9) a heterodimerizer, such as rapamycin or a rapalog, induces activation of a modified cell, and a homodimerizer, such as AP1903 activates a safety switch, causing apoptosis of the modified cell. In this embodiment, for example, a chimeric pro-apoptotic polypeptide, such as, for example, Caspase-9, comprising an Fᵥ region (iFvC9) is expressed in a cell along with an inducible chimeric MyD88/CD40 costimulating polypeptide, that comprises MyD88 and CD40 polypeptides and both an FKBP12 and an FRB or FRB variant region (iFRBFwtMC) (MC.FvFv). Upon contacting the cell with rapamycin or a rapalog that heterodimerizes the FKBP12 and FRB regions, the iFRBFwtMC dimerizes or multimerizes, and activates the cell. The cell may, for example, be a T cell that expresses a chimeric antigen receptor directed against a target antigen (CARζ). As a safety switch, the cell may be contacted with a homodimerizer, such as, for example, AP1903, that binds to the iFvC9 polypeptide, causing direct dimerization of the Caspase-9 polypeptide, and inducing apoptosis. (FIG. 57 (right)).

[0012] It yet another embodiment of the dual switch compositions and methods of the present application, dual switch apoptotic polypeptides, modified cells that express the dual switch apoptotic polypeptides, and nucleic acids that encode the dual switch apoptotic polypeptides are provided. These dual switch chimeric pro-apoptotic polypeptides allow for a choice of ligand inducer. For example, in one embodiment, modified cells are provided that expresses a FRB.FKBPᵥ.ΔC9 polypeptide, or a FKBPᵥ.FRBΔC9 polypeptide; apoptosis may be induced by contacting the modified cell with either a heterodimer, such as rapamycin or a rapalog, or the homodimer, rimiducid.

[0013] Thus, in some embodiments, modified cells are provided that comprise polynucleotides that encode dual switch chimeric pro-apoptotic polypeptides, for example, FRB.FKBPᵥ.ΔC9 polypeptide, or a FKBPv.FRBΔC9 polypeptides, wherein the FRB polypeptide region may be an FRB variant polypeptide region, such as, for example, FRB_{L}. It is understood that where FRB is denoted, such as, for example, the table of nomenclature herein, other FRB derivatives may be used, such as, for example, FRB_{L}. Similarly, where polypeptides comprising FRB_{L} is provided as an example of a composition or method of the present application, it is understood that RB or FRB variants or derivatives other than FRB_{L} may be used, with the appropriate ligand, such as rapamycin or a rapalog. It is also understood that FKBP12 variants other than FKBP12v36 may be substituted for FKBP12v36, as appropriate The modified cells may further comprise polynucleotides that encode a heterologous protein such as, for example, a chimeric antigen receptor or a recombinant T cell receptor. The modified cells may further comprise polynucleotides that encode a costimulatory polypeptide, such as, for example, a polypeptide that comprises a MyD88 polypeptide region, or a truncated MyD88 polypeptide region lacking the TIR domain, or, for example, a polypeptide that comprises a MyD88 polypeptide region or a truncated MyD88 polypeptide region lacking the TIR domain and a CD40 cytoplasmic polypeptide region lacking the extracellular domain. Also provided in some embodiments are nucleic acids that comprise polynucleotides that encode dual switch chimeric pro-apoptotic polypeptides, for example, FRB.FKBPV.ΔC9 polypeptide, or a FKBPv.FRBΔC9 polypeptides, wherein the FRB polypeptide region may be an FRB variant polypeptide region, such as, for example, FRB_{L}. The nucleic acids may further comprise polynucleotides that encode a heterologous protein such as, for example, a chimeric antigen receptor or a recombinant T cell receptor. The nucleic acids may further comprise polynucleotides that encode a costimulatory polypeptide, such as, for example, a polypeptide that comprises a MyD88 polypeptide region, or a truncated MyD88 polypeptide region lacking the TIR domain, or, for example, a polypeptide that comprises a MyD88 polypeptide region or a truncated MyD88 polypeptide region lacking the TIR domain and a CD40 cytoplasmic polypeptide region lacking the extracellular domain.

[0014] In some embodiments of the present application, chimeric polypeptides are provided, wherein a first chimeric polypeptide comprises a first multimerizing region that binds to a first ligand; the first multimerizing region comprises a first ligand binding unit and a second ligand binding unit; the first ligand is a multimeric ligand comprising a first portion and a second portion; the first ligand binding unit binds to the first portion of the first ligand and does not bind significantly to the second portion of the first ligand; and the second ligand binding unit binds to the second portion of the first ligand and does not bind significantly to the first portion of the first ligand. In some embodiments, a second chimeric polypeptide is also provided, wherein the second chimeric polypeptide comprises a second multimerizing region that binds to a second ligand; the second multimerizing region comprises a third ligand binding unit; the second ligand is a multimeric ligand comprising a third portion; and the third ligand binding unit binds to the third portion of the second ligand and does not bind significantly to the second portion of the first ligand. Examples of first ligand binding units include, but are not limited to, FKBP12 multimerizing regions, or variants, such as FKBP12v36, examples of second ligand binding units are, for example, FRB or FRB variant multimerizing regions. Examples of a third ligand binding unit include, for example, but are not limited to, FKBP12 multimerizing regions, or variants, such as FKBP12v36. In certain embodiments, the first ligand binding unit is FKBP12, and the third ligand binding unit is FKBP12v36. In certain embodiments, the first ligand is rapamycin, or a rapalog, and the second ligand is rimiducid (AP1903).

[0015] The multimerizing regions, such as FKBP12/FRB, FRB/FKBP12, and FKBP12v36, may be located amino terminal to the pro-apoptotic polypeptide or costimulatory polypeptide, or, in other examples, may be located carboxyl terminal to the pro-apoptotic polypeptide or costimulatory polypeptide. Additional polypeptides, such as, for example, linker polypeptides, stem polypeptides, spacer polypeptides, or in some examples, marker polypeptides, may be located between the multimerizing region and the pro-apoptotic polypeptide or costimulatory polypeptide, in the chimeric polypeptides.

[0016] Thus, provided in some embodiments are modified cells, comprising a first polynucleotide encoding a chimeric pro-apoptotic polypeptide, wherein the chimeric pro-apoptotic polypeptide comprises (i) a pro-apoptotic polypeptide region; (ii) a FKBP12-Rapamycin-Binding (FRB) domain polypeptide, or FRB variant polypeptide region; and (iii) a FKBP12 or FKBP12 variant polypeptide region (FKBP12v); and a second polynucleotide encoding a chimeric costimulating polypeptide, wherein the chimeric costimulating polypeptide comprises one or more, for example, 1, 2, or 3 FKBP12 variant polypeptide regions and i) a MyD88 polypeptide region or a truncated MyD88 polypeptide region lacking the TIR domain; or ii) a MyD88 polypeptide region or a truncated MyD88 polypeptide region lacking the TIR domain, and a CD40 cytoplasmic polypeptide region lacking the CD40 extracellular domain. In some embodiments, the modified cell further comprises a third polynucleotide encoding a chimeric antigen receptor or a recombinant T cell receptor.

[0017] Also provided in some embodiments is a nucleic acid comprising a promoter operably linked to a first polynucleotide encoding a chimeric pro-apoptotic polypeptide, wherein the chimeric pro-apoptotic polypeptide comprises (i) a pro-apoptotic polypeptide region; (ii) a FKBP12-Rapamycin-Binding (FRB) domain polypeptide, or FRB variant polypeptide region; and (iii) a FKBP12 or FKBP12 variant polypeptide region (FKBP12v); and a second polynucleotide encoding a chimeric costimulating polypeptide, wherein the chimeric costimulating polypeptide comprises one or more, for example, 1, 2, or 3 FKBP12 variant polypeptide regions and i) a MyD88 polypeptide region or a truncated MyD88 polypeptide region lacking the TIR domain; or ii) a MyD88 polypeptide region or a truncated MyD88 polypeptide region lacking the TIR domain, and a CD40 cytoplasmic polypeptide region lacking the CD40 extracellular domain. In some embodiments, the chimeric costimulating polypeptide comprises a truncated MyD88 polypeptide region lacking the TIR domain and a CD40 cytoplasmic polypeptide region lacking the CD40 extracellular domain. In some embodiments, the promoter is operably linked to a third polynucleotide, wherein the third polynucleotide encodes a chimeric antigen receptor or a recombinant T cell receptor. In some embodiments, the pro-apoptotic polypeptide is a Caspase-9 polypeptide, wherein the Caspase-9 polypeptide lacks the CARD domain. In some embodiments, the cell is a T cell, tumor infiltrating lymphocyte, NK-T cell, or NK cell. Also provided in some embodiments are kits or compositions comprising nucleic acid comprising a first polynucleotide encoding a chimeric pro-apoptotic polypeptide, wherein the chimeric pro-apoptotic polypeptide comprises (i) a pro-apoptotic polypeptide region; (ii) a FKBP12-Rapamycin-Binding (FRB) domain polypeptide region, or variant thereof; and (iii) a FKBP12 polypeptide or FKBP12 variant polypeptide region (FKBP12v); and a second polynucleotide encoding a chimeric costimulating polypeptide, wherein the chimeric costimulating polypeptide comprises one or more, for example, 1, 2, or 3 FKBP12 variant polypeptide regions and i) a MyD88 polypeptide region or a truncated MyD88 polypeptide region lacking the TIR domain; or ii) a MyD88 polypeptide region or a truncated MyD88 polypeptide region lacking the TIR domain, and a CD40 cytoplasmic polypeptide region lacking the CD40 extracellular domain. In some embodiments, methods are provided for expressing a chimeric pro-apoptotic polypeptide, wherein the chimeric pro-apoptotic polypeptide comprises a pro-apoptotic polypeptide region; a FRB polypeptide or FRB variant polypeptide region; and a FKBP12 polypeptide region of the present embodiments, comprising contacting a nucleic acid of the present embodiments with a cell under conditions in which the nucleic acid is incorporated into the cell, whereby the cell expresses the chimeric pro-apoptotic polypeptide from the incorporated nucleic acid.

[0018] In some embodiments, methods are provided for stimulating an immune response in a subject, comprising: transplanting modified cells of the present embodiments into the subject, and after (a), administering an effective amount of a ligand that binds to the FKBP12 variant polypeptide region of the chimeric costimulating polypeptide to stimulate a cell mediated immune response. In some embodiments, methods are provided for administering a ligand to a subject who has undergone cell therapy using modified cells, comprising administering a ligand that binds to the FKBP variant region of the chimeric costimulating polypeptide to the human subject, wherein the modified cells comprise modified cells of the present embodiments the present embodiments. Also provided are methods for treating a subject having a disease or condition associated with an elevated expression of a target antigen expressed by a target cell, comprising a) transplanting an effective amount of modified cells into the subject; wherein the modified cells comprise a modified cell of the present embodiments, wherein the modified cell comprises a chimeric antigen receptor or a recombinant T cell receptor comprising an antigen recognition moiety that binds to the target antigen, and b) after a), administering an effective amount of a ligand that binds to the FKBP12 variant polypeptide region of the chimeric costimulating polypeptide to reduce the number or concentration of target antigen or target cells in the subject. Also provided are methods for reducing the size of a tumor in a subject, comprising a) administering a modified cell of the present embodiments to the subject, wherein the cell comprises a chimeric antigen receptor or a recombinant T cell receptor comprising an antigen recognition moiety that binds to an antigen on the tumor; and b) after a), administering an effective amount of a ligand that binds to the FKBP12 variant polypeptide region of the chimeric costimulating polypeptide to reduce the size of the tumor in the subject. Also provided are methods for controlling survival of transplanted modified cells in a subject, comprising transplanting modified cells of the present embodiments into the subject; and administering to the subject rapamycin or a rapalog that binds to the FRB polypeptide or FRB variant polypeptide region of the chimeric pro-apoptotic polypeptide in an amount effective to kill at least 30% of the modified cells that express the chimeric pro-apoptotic polypeptide.

[0019] In other embodiments, modified cells are provided comprising a first polynucleotide encoding a chimeric pro-apoptotic polypeptide, wherein the chimeric pro-apoptotic polypeptide comprises i) a pro-apoptotic polypeptide region; and ii) a FKBP12 variant polypeptide region; and a second polynucleotide encoding a chimeric costimulating polypeptide, wherein the chimeric costimulating polypeptide comprises a FKBP12-Rapamycin Binding (FRB) domain polypeptide or FRB variant polypeptide region; a FKBP12 polypeptide or FKBP12 variant polypeptide region; and a MyD88 polypeptide region or a truncated MyD88 polypeptide region lacking the TIR domain, or a MyD88 polypeptide region, or a truncated MyD88 polypeptide region lacking the TIR domain and a CD40 cytoplasmic polypeptide region lacking the CD40 extracellular domain. In some embodiments, the chimeric costimulating polypeptide comprises a truncated MyD88 polypeptide region lacking the TIR domain and a CD40 cytoplasmic polypeptide region lacking the CD40 extracellular domain. In some embodiments, the cell further comprises a third polynucleotide, wherein the third polynucleotide encodes a chimeric antigen receptor or a recombinant T cell receptor.

[0020] In some embodiments, nucleic acids are provided, wherein the nucleic acids comprise a promoter operably linked to a first polynucleotide encoding a chimeric pro-apoptotic polypeptide, wherein the chimeric pro-apoptotic polypeptide comprises i) a pro-apoptotic polypeptide region; and i) a FKBP12 variant polypeptide region; and a second polynucleotide encoding a chimeric costimulating polypeptide, wherein the chimeric costimulating polypeptide comprises i) a FKBP12-Rapamycin Binding (FRB) domain polypeptide or FRB variant polypeptide region; ii) a FKBP12 polypeptide region; and ii) a MyD88 polypeptide region or a truncated MyD88 polypeptide region lacking the TIR domain, or a MyD88 polypeptide region or a truncated MyD88 polypeptide region lacking the TIR domain and a CD40 cytoplasmic polypeptide region lacking the CD40 extracellular domain. In some embodiments, the chimeric costimulating polypeptide comprises a truncated MyD88 polypeptide region lacking the TIR domain and a CD40 cytoplasmic polypeptide region lacking the CD40 extracellular domain. In some embodiments, the promoter is operably linked to a third polynucleotide, wherein the third polynucleotide encodes chimeric antigen receptor or a recombinant T cell receptor. In some embodiments, the pro-apoptotic polypeptide is a Caspase-9 polypeptide, wherein the Caspase-9 polypeptide lacks the CARD domain. In some embodiments, the cell is a T cell, tumor infiltrating lymphocyte, NK-T cell, or NK cell. Also provided are kits or compositions comprising nucleic acids comprising polynucleotides of the present embodiments. Also provided are methods for expressing a chimeric pro-apoptotic polypeptide and a chimeric costimulating polypeptide, wherein a) the chimeric pro-apoptotic polypeptide comprises i) a pro-apoptotic polypeptide region; and ii) a FKBP12 variant polypeptide region; and b) the chimeric costimulating polypeptide comprises a FRB or FRB variant polypeptide region; a FKBP12 polypeptide region; and a MyD88 polypeptide region or a truncated MyD88 polypeptide region lacking the TIR domain, or a MyD88 polypeptide region or a truncated MyD88 polypeptide region lacking the TIR domain and a CD40 cytoplasmic polypeptide region lacking the CD40 extracellular domain comprising contacting a nucleic acid is a nucleic acid comprising a promoter operably linked to a polynucleotide coding for a chimeric pro-apoptotic polypeptide, wherein the chimeric pro-apoptotic polypeptide comprises a) a pro-apoptotic polypeptide region; b) a FKBP12-Rapamycin binding domain (FRB) polypeptide or FRB variant polypeptide region; and c) a FKBP12 variant polypeptide region, with a cell under conditions in which the nucleic acid is incorporated into the cell, whereby the cell expresses the chimeric pro-apoptotic polypeptide and the chimeric costimulating polypeptide from the incorporated nucleic acid.

[0021] In some embodiments, methods are provided of stimulating an immune response in a subject, comprising: a) transplanting modified cells of the present embodiments into the subject, and b) after (a), administering an effective amount of a rapamycin or a rapalog that binds to the FRB polypeptide or FRB variant polypeptide region of the chimeric stimulating polypeptide to stimulate a cell mediated immune response. In some embodiments, methods are provided of administering a ligand to a subject who has undergone cell therapy using modified cells, comprising administering rapamycin or a rapalog to the subject, wherein the modified cells comprise modified cells of the present embodiments. In some embodiments, methods are provided for treating a subject having a disease or condition associated with an elevated expression of a target antigen expressed by a target cell, comprising a) transplanting an effective amount of modified cells into the subject; wherein the modified cells comprise a modified cell of the present embodiments, wherein the modified cell comprises a chimeric antigen receptor or a recombinant T cell receptor comprising an antigen recognition moiety that binds to the target antigen, and b) after a), administering an effective amount of rapamycin or a rapalog that binds to the FRB polypeptide or FRB variant region of the chimeric stimulating polypeptide to reduce the number or concentration of target antigen or target cells in the subject. In some embodiments, methods are provided for reducing the size of a tumor in a subject, comprising a) administering a modified cell of the present embodiments to the subject, wherein the cell comprises a chimeric antigen receptor or a recombinant T cell receptor comprising an antigen recognition moiety that binds to an antigen on the tumor; and b) after a), administering an effective amount of rapamycin or a rapalog that binds to the FRB or FRB variant polypeptide region of the chimeric stimulating polypeptide to reduce the size of the tumor in the subject. In some embodiments, methods are provided for controlling survival of transplanted modified cells in a subject, comprising a) transplanting modified cells of the present embodiments into the subject, and after (a), administering to the subject a ligand that binds to the FKBP12 variant polypeptide region of the chimeric pro-apoptotic polypeptide in an amount effective to kill at least 90% of the modified cells that express the chimeric pro-apoptotic polypeptide.

[0022] In some embodiments of the present application, the chimeric costimulating polypeptide comprises two FKBP12 variant polypeptide regions, and a truncated MyD88 polypeptide region lacking the TIR domain. In some embodiments, the chimeric costimulating polypeptide further comprises a CD40 cytoplasmic polypeptide region lacking the CD40 extracellular domain. In some embodiments of the present application, the chimeric costimulating polypeptide comprises 2 FKBP12 variant polypeptide regions.

[0023] Also provided in the present application is a nucleic acid comprising a promoter operably linked to a polynucleotide coding for a chimeric pro-apoptotic polypeptide, wherein the chimeric pro-apoptotic polypeptide comprises a) a pro-apoptotic polypeptide region; b) a FKBP12-Rapamycin binding domain (FRB) polypeptide or FRB variant polypeptide region; and c) a FKBP12 variant polypeptide region. In some embodiments, wherein the FKBP12 variant comprises an amino acid substitution at amino acid residue 36. In some embodiments, the FKBP12 variant polypeptide region is a FKBP12v36 polypeptide region. In some embodiments, the FRB variant polypeptide region is selected from the group consisting of KLW (T2098L) (FRB_{L}), KTF (W2101F), and KLF (T2098L, W2101F). In some embodiments, a chimeric pro-apoptotic polypeptide encoded by a nucleic acid of the present embodiments is provided. In some embodiments, modified cells are provided that are transfected or transduced with a nucleic acid of the present embodiments. In some embodiments, the modified cells comprise a polynucleotide that encodes a chimeric antigen receptor or a recombinant TCR. In some embodiments, methods are provided of controlling survival of transplanted modified cells in a subject, comprising: a) transplanting modified cells of the present embodiments, wherein the modified cells comprise a nucleic acid comprising a promoter operably linked to a polynucleotide coding for a chimeric pro-apoptotic polypeptide, wherein the chimeric pro-apoptotic polypeptide comprises a) a pro-apoptotic polypeptide region; b) a FKBP12-Rapamycin binding domain (FRB) polypeptide or FRB variant polypeptide region; and c) a FKBP12 variant polypeptide region of the present embodiments into the subject; and b) after (a), administering to the subject i) a first ligand that binds to the FRB or FRB variant polypeptide region of the chimeric pro-apoptotic polypeptide; or ii) a second ligand that binds to the FKBP12 variant polypeptide region of the chimeric pro-apoptotic polypeptide wherein the first ligand or the second ligand are administered in an amount effective to kill at least 30% of the modified cells that express the chimeric pro-apoptotic polypeptide.

[0024] Autologous T cells expressing chimeric antigen receptors (CARs) directed toward tumor-associated antigens (TAAs) have had a transformational effect in initial clinical trials on the treatment of certain types of leukemias (“liquid tumors”) and lymphomas with objective response (OR) rates approaching 90%. Despite their great clinical promise and the predictable accompanying enthusiasm, this success is tempered by the observed high level of on-target, off-tumor adverse events, typical of a cytokine release syndrome (CRS). To maintain the benefit of these revolutionary treatments while minimizing the risk, a tunable safety switch has been developed, in order to control the activity level of CAR-expressing T cells. An inducible costimulatory chimeric polypeptide allows for a sustained, modulated control of a chimeric antigen receptor (CAR) that is co-expressed in the cell. The ligand inducer activates the CAR-expressing cell by multimerizing the inducible chimeric signaling molecules, which, in turn, induces NF-κB and other intracellular signaling pathways, leading to the activation of the target cells, for example, a T cell, a tumor-infiltrating lymphocyte (TIL), a natural killer (NK) cell, or a natural killer T (NK-T) cell. In the absence of the ligand inducer, the T cell is quiescent, or has a basal level of activity.

[0025] At the second level of control, a “dimmer” switch may allow for continued cell therapy, while reducing or eliminating significant side effects by eliminating the therapeutic cells from the subject, as needed. This dimmer switch is dependent on a second ligand inducer. In some examples, where there is a need to rapidly eliminate the therapeutic cells, an appropriate dose of the second ligand inducer is administered in order to eliminate over 90% or 95% of the therapeutic cells from the patient. This second level of control may be “tunable,” that is, the level of removal of the therapeutic cells may be controlled so that it results in partial removal of the therapeutic cells. This second level of control may include, for example, a chimeric pro-apoptotic polypeptide.

[0026] In some examples, the chimeric apoptotic polypeptide comprises a binding site for rapamycin, or a rapamycin analog (rapalog); also present in the therapeutic cell is an inducible chimeric polypeptide that, upon induction by a ligand inducer, activates the therapeutic cell; in some examples, the inducible chimeric polypeptide provides costimulatory activity to the therapeutic cell. The CAR may be present on a separate polypeptide expressed in the cell. In other examples, the CAR may be present as part of the same polypeptide as the inducible chimeric polypeptide. Using this controllable first level, the need for continued therapy, or the need to stimulate therapy, may be balanced with the need to eliminate or reduce the level of negative side effects.

[0027] In some embodiments, a rapamycin analog, or “rapalog”, is administered to the patient, which then binds to both the caspase polypeptide and the chimeric antigen receptor, thus recruiting the caspase polypeptide to the location of the CAR, and aggregating the caspase polypeptide. Upon aggregation, the caspase polypeptide induces apoptosis. The amount of rapamycin or rapamycin analog administered to the patient may vary; if the removal of a lower level of cells by apoptosis is desired in order to reduce side effects and continue CAR therapy, a lower level of rapamycin or rapalog may be administered to the patient.

[0028] At the second level of therapeutic cell elimination, selective apoptosis may be induced in cells that express a chimeric Caspase-9 polypeptide fused to a dimeric ligand binding polypeptide, such as, for example, the AP1903-binding polypeptide FKBP12v36, by administering rimiducid (AP1903). In some examples, the Caspase-9 polypeptide includes amino acid substitutions that result in a lower level of basal apoptotic activity as part of the inducible chimeric polypeptide, than the wild type Caspase-9 polypeptide.

[0029] In some embodiments, the nucleic acid encoding the chimeric polypeptides of the present application further comprise a polynucleotide encoding a chimeric antigen receptor, a T cell receptor, or a T cell receptor-based chimeric antigen receptor. In some embodiments, the chimeric antigen receptor comprises (i) a transmembrane region, (ii) a T cell activation molecule, and (iii) an antigen recognition moiety. Also provided are modified cells transfected or transduced with a nucleic acid discussed herein.

[0030] In some aspects of the present application, the cells are transduced or transfected with a viral vector. The viral vector may be, for example, but not limited to, a retroviral vector, such as, for example, but not limited to, a murine leukemia virus vector; an SFG vector; and adenoviral vector, or a lentiviral vector.

[0031] In some embodiments, the cell is isolated. In some embodiments, the cell is in a human subject. In some embodiments, the cell is transplanted in a human subject.

[0032] In some embodiments, personalized treatment is provided wherein the stage or level of the disease or condition is determined before administration of the multimeric ligand, before the administration of an additional dose of the multimeric ligand, or in determining method and dosage involved in the administration of the multimeric ligand. These methods may be used in any of the methods of any of the diseases or conditions of the present application. Where these methods of assessing the patient before administering the ligand are discussed in the context of graft versus host disease, it is understood that these methods may be similarly applied to the treatment of other conditions and diseases. Thus, for example, in some embodiments of the present application, the method comprises administering therapeutic cells to a patient, and further comprises identifying a presence or absence of a condition in the patient that requires the removal of transfected or transduced therapeutic cells from the patient; and administering a multimeric ligand that binds to the multimerizing region, maintaining a subsequent dosage of the multimeric ligand, or adjusting a subsequent dosage of the multimeric ligand to the patient based on the presence or absence of the condition identified in the patient. And, for example, in other embodiments of the present application, the method further comprises determining whether to administer an additional dose or additional doses of the multimeric ligand to the patient based upon the appearance of graft versus host disease symptoms in the patient. In some embodiments, the method further comprises identifying the presence, absence or stage of graft versus host disease in the patient, and administering a multimeric ligand that binds to the multimerizing region, maintaining a subsequent dosage of the multimeric ligand, or adjusting a subsequent dosage of the multimeric ligand to the patient based on the presence, absence or stage of the graft versus host disease identified in the patient. In some embodiments, the method further comprises identifying the presence, absence or stage of graft versus host disease in the patient, and determining whether a multimeric ligand that binds to the multimerizing region should be administered to the patient, or the dosage of the multimeric ligand subsequently administered to the patient is adjusted based on the presence, absence or stage of the graft versus host disease identified in the patient. In some embodiments, the method further comprises receiving information comprising the presence, absence or stage of graft versus host disease in the patient; and administering a multimeric ligand that binds to the multimerizing region, maintaining a subsequent dosage of the multimeric ligand, or adjusting a subsequent dosage of the multimeric ligand to the patient based on the presence, absence or stage of the graft versus host disease identified in the patient. In some embodiments, the method further comprises identifying the presence, absence or stage of graft versus host disease in the patient, and transmitting the presence, absence or stage of the graft versus host disease to a decision maker who administers a multimeric ligand that binds to the multimerizing region, maintains a subsequent dosage of the multimeric ligand, or adjusts a subsequent dosage of the multimeric ligand administered to the patient based on the presence, absence or stage of the graft versus host disease identified in the subject. In some embodiments, the method further comprises identifying the presence, absence or stage of graft versus host disease in the patient, and transmitting an indication to administer a multimeric ligand that binds to the multimeric binding region, maintain a subsequent dosage of the multimeric ligand or adjust a subsequent dosage of the multimeric ligand administered to the patient based on the presence, absence or stage of the graft versus host disease identified in the subject.

[0033] Also provided is a method for administering donor T cells to a human patient, comprising administering a transduced or transfected T cell of the present application to a human patient, wherein the cells are non-allodepleted human donor T cells.

[0034] In some embodiments, the therapeutic cells are administered to a subject having a non-malignant disorder, or where the subject has been diagnosed with a non-malignant disorder, such as, for example, a primary immune deficiency disorder (for example, but not limited to, Severe Combined Immune Deficiency (SCID), Combined Immune Deficiency (CID), Congenital T-cell Defect/Deficiency, Common Variable Immune Deficiency (CVID), Chronic Granulomatous Disease, IPEX (Immune deficiency, polyendocrinopathy, enteropathy, X-linked) or IPEX-like, Wiskott-Aldrich Syndrome, CD40 Ligand Deficiency, Leukocyte Adhesion Deficiency, DOCK 8 Deficiency, IL-10 Deficiency/IL-10 Receptor Deficiency, GATA 2 deficiency, X-linked lymphoproliferative disease (XLP), Cartilage Hair Hypoplasia, and the like), Hemophagocytosis Lymphohistiocytosis (HLH) or other hemophagocytic disorders, Inherited Marrow Failure Disorders (such as, for example, but not limited to, Shwachman Diamond Syndrome, Diamond Blackfan Anemia, Dyskeratosis Congenita, Fanconi Anemia, Congenital Neutropenia, and the like), Hemoglobinopathies (such as, for example, but not limited to, Sickle Cell Disease, Thalassemia, and the like), Metabolic Disorders (such as, for example, but not limited to, Mucopolysaccharidosis, Sphingolipidoses, and the like), or an Osteoclast disorder (such as, for example, but not limited to Osteopetrosis).

[0035] The therapeutic cells may be, for example, any cell administered to a patient for a desired therapeutic result. The cells may be, for example, T cells, natural killer cells, B cells, macrophages, peripheral blood cells, hematopoietic progenitor cells, bone marrow cells, or tumor cells. The modified Caspase-9 polypeptide can also be used to directly kill tumor cells. In one application, vectors comprising polynucleotides coding for the inducible modified Caspase-9 polypeptide would be injected into a tumor and after 10-24 hours (to permit protein expression), the ligand inducer, such as, for example, AP1903, would be administered to trigger apoptosis, causing the release of tumor antigens to the microenvironment. To further improve the tumor microenvironment to be more immunogenic, the treatment may be combined with one or more adjuvants (e.g., IL-12, TLRs, IDO inhibitors, etc.). In some embodiments, the cells may be delivered to treat a solid tumor, such as, for example, delivery of the cells to a tumor bed. In some embodiments, a polynucleotide encoding the chimeric Caspase-9 polypeptide may be administered as part of a vaccine, or by direct delivery to a tumor bed, resulting in expression of the chimeric Caspase-9 polypeptide in the tumor cells, followed by apoptosis of tumor cells following administration of the ligand inducer. Thus, also provided in some embodiments are nucleic acid vaccines, such as DNA vaccines, wherein the vaccine comprises a nucleic acid comprising a polynucleotide that encodes an inducible, or modified inducible Caspase-9 polypeptide of the present application. The vaccine may be administered to a subject, thereby transforming or transducing target cells in vivo. The ligand inducer is then administered following the methods of the present application.

[0036] In some embodiments, the modified Caspase-9 polypeptide is a truncated modified Caspase-9 polypeptide. In some embodiments, the modified Caspase-9 polypeptide lacks the Caspase recruitment domain. In some embodiments, the Caspase-9 polypeptide comprises the amino acid sequence of SEQ ID NO: 9, or a fragment thereof, or is encoded by the nucleotide sequence of SEQ ID NO: 8, or a fragment thereof.

[0037] In some embodiments, the methods further comprise administering a multimeric ligand that binds to the multimeric ligand binding region. In some embodiments, the multimeric ligand binding region is selected from the group consisting of FKBP, cyclophilin receptor, steroid receptor, tetracycline receptor, heavy chain antibody subunit, light chain antibody subunit, single chain antibodies comprised of heavy and light chain variable regions in tandem separated by a flexible linker domain, and mutated sequences thereof. In some embodiments, the multimeric ligand binding region is an FKBP12 region. In some embodiments, the multimeric ligand is an FK506 dimer or a dimeric FK506-like analog ligand. In some embodiments, the multimeric ligand is AP1903. In some embodiments, the number of therapeutic cells is reduced by from about 60% to 99%, about 70% to 95%, from 80% to 90% or about 90% or more after administration of the multimeric ligand. In some embodiments, after administration of the multimeric ligand, donor T cells survive in the patient that are able to expand and are reactive to viruses and fungi. In some embodiments, after administration of the multimeric ligand, donor T cells survive in the patient that are able to expand and are reactive to tumor cells in the patient.

[0038] In some embodiments, the suicide gene used in the second level of control is a caspase polypeptide, for example, Caspase 1, 2, 3, 4, 5, 6, 7, 8, 9, 10, 11, 12, 13, or 14. In certain embodiments, the caspase polypeptide is a Caspase-9 polypeptide. In certain embodiments, the Caspase-9 polypeptide comprises an amino acid sequence of a catalytically active (not catalytically dead) caspase variant polypeptide provided in Table 5 or 6 herein. In other embodiments, the Caspase-9 polypeptide consists of an amino acid sequence of a catalytically active (not catalytically dead) caspase variant polypeptide provided in Table 5 or 6 herein. In other embodiments, a caspase polypeptide may be used that has a lower basal activity in the absence of the ligand inducer. For example, when included as part of a chimeric inducible caspase polypeptide, certain modified Caspase-9 polypeptides may have lower basal activity compared to wild type Caspase-9 in the chimeric construct. For example, the modified Caspase-9 polypeptide may comprise an amino acid sequence having at least 90% sequence identity to SEQ ID NO: 9, and may comprise at least one amino acid substitution.

[0039] Certain embodiments are described further in the following description, examples, claims and drawings.

### BRIEF DESCRIPTION OF THE DRAWINGS

[0040] The drawings illustrate embodiments of the technology and are not limiting. For clarity and ease of illustration, the drawings are not made to scale and, in some instances, various aspects may be shown exaggerated or enlarged to facilitate an understanding of particular embodiments.

[0041] FIG. 1A illustrates various iCasp9 expression vectors as discussed herein. FIG. 1B illustrates a representative western blot of full length and truncated Caspase-9 protein produced by the expression vectors shown in FIG. 1A. FIG. 1A discloses “GCCACC” as SEQ ID NO: 923 and “Ser-Gly-Gly-Gly-Ser” as SEQ ID NO: 924.

[0042] FIG. 2 is a schematic of the interaction of the suicide gene product and the CID to cause apoptosis.

[0043] FIG. 3 is a schematic depicting a two-tiered regulation of apoptosis. The left section depicts rapalog-mediated recruitment of an inducible caspase polypeptide to FRBI-modified CAR. The right section depicts a rimiducid (AP1903)-mediated inducible caspase polypeptide.

[0044] FIG. 4 is a plasmid map of a vector encoding FRB_{L}-modified CD19-MC-CAR and inducible Caspase-9. pSFG-iCasp9-2A-CD19-Q-CD28stm-MCz-FRB_{L}2.

[0045] FIG. 5 is a plasmid map of a vector encoding FRB_{L}-modified Her2-MC-CAR and an inducible Caspase-9 polypeptide. pSFG-iCasp9-2A-aHer2-Q_CD28stm-mMCz-FRB_{L}2.

[0046] FIGS. 6A and 6B provide the results of an assay of two-tiered activation of apoptosis. FIG. 6A shows recruitment of an inducible Caspase-9 polypeptide (iC9) with rapamycin, leading to more gradual apoptosis titration. FIG. 6B shows complete apoptosis using rimiducid (AP1903).

[0047] FIG. 7 is a plasmid map of the pBP0545 vector, pBP0545.pSFG.iCasp9.2A.Her2scFv.Q.CD8stm.MC-zeta.

[0048] FIGS. 8A-8C illustrate that FRB or FKBP12-based scaffolds can multimerize signaling domains. FIG. 8A. Homodimerization of a signaling domain (red stick), like Caspase-9, can be achieved via a heterodimer that binds to the FRB-fused signaling domain on one side and FKBP12-fused domain on the other. FIG. 8B. Dimerization or multimerization of a signaling domain via 2 (left) or more (right) tandem copies of FRB (chevron). The scaffold can contain subcellular targeting sequences to localize proteins to the plasma membrane (as depicted), the nucleus or organelles. FIG. 8C. Similar to FIG. 8B, but domain polarity is reversed.

[0049] FIGS. 9A-9C provide schematics of iMC-mediated scaffolding of FRB_{L}2.Caspase-9. FIG. 9A. In the presence of a heterodimer drug, such as a rapamycin, the FRB_{L}2-linked Caspase-9 binds with and clusters the FKBP-modified MyD88/CD40 (MC) signaling molecule. This clustering effect results in dimerization of FRB_{L}2.Caspase-9 and subsequent induction of cellular death via the apoptotic pathway. FIG. 9B. Similar to panel 9A, however the FKBP and FRB domains have been switched in relation to associated Caspase-9 and MC domains. The clustering effect still occurs in the presence of heterodimer drug. FIG. 9C. Similar to panel 9A; however there is only one FKBP domain attached to MC. Therefore, in the presence of heterodimer, Caspase-9 is no longer capable of being clustered and therefore apoptosis is not induced.

[0050] FIG. 10A-10E provide schematics of a rapalog-induced, FRB scaffold-based inducible Caspase-9 polypeptide. FIG. 10A: Rimiducid homodimerizes FKBPv-linked Caspase-9, resulting in dimerization and activation of Caspase-9 with subsequent induction of cellular death via the apoptotic pathway. FIG. 10B: Rapalogs heterodimerize FKBPv-linked Caspase-9 with FRB-linked Caspase-9, resulting in dimerization of Caspase-9 and cell death. FIG. 10C, FIG. 10D, FIG. 10E are schematics illustrating that in the presence of a heterodimer drug, such as a rapalog, 2 or more FRB_{L} domains act as a scaffold to recruit binding of FKBPv-linked Caspase-9, leading to dimerization or oligomerization of Caspase-9 and cell death.

[0051] FIG. 11A is a schematic and FIG. 11B is a line graph depicting activation of apoptosis by dimerization of a chimeric FRB-Caspase-9 polypeptide and a chimeric FKBP-Caspase-9 polypeptide (FRB_{L}-ΔCaspase-9 and FKBPv-ΔCaspase-9) with rapamycin. FIG. 11A. Schematic representation of dimerization of FRB and FKBP12 with rapamycin to bring together fused Caspase-9 signaling domains and activation of apoptosis. FIG. 11B. Reporter assays were performed in HEK-293T cells transfected with the constitutive SRα-SEAP reporter (pBP046, 1 μg), a fusion of FRB_{L} (L2098) and human ΔCaspase-9 (pBP0463, 2 μg) and a fusion of FKBP12 with ΔCaspase-9 (pBP0044, 2 μg).

[0052] FIG. 12A is a schematic and FIGS. 12B and 12C are line graphs depicting assembly of FKBP-Caspase-9 on a FRB-based scaffold. FIG. 12A: Schematic of iterated FRB domains to provide scaffolds for rapamycin (or rapalog)-mediated multimerization of an FKBP12-Caspase-9 fusion protein. FIG. 12B: Cultures of HEK-293 cells were transfected (via Genejuice, Novagen) with the constitutive SRα-SEAP reporter plasmid (pBP0046, 1 μg), a fusion of human FKBP12 with human Caspase-9 (pBP0044, 2 μg) and FRB-encoding expression constructs, containing four copies of FRB_{L} (pBP0725, 2 μg) or control vectors encoding zero or one copy of FRB_{L}. 24 hours post-transfection, cells were distributed into 96-well plates and rapamycin or a derivative rapalog, C7-isopropoxyrapamycin, with specificity for the mutant FRB_{L} (Liberles et al, 1997) were administered in triplicate wells. Placental SEAP reporter activity was determined 24 hours post-drug administration. FIG. 12C: Reporter assays were performed as in (B), but FRB-scaffolds were expressed from constructs encoding iterated FRB_{L} domains with an amino-terminal myristoylation-targeting sequence and two (pBP0465) or four copies (pBP0721) of the FRB_{L} domain.

[0053] FIG. 13A is a schematic and FIG. 13B is a line graph depicting assembly of FRB-ΔCaspase-9 on an FKBP scaffold. FIG. 13A. Schematic of iterated FKBP12 domains to produce scaffolds for assembly of rapamycin (or rapalog)-mediated multimerization of FRB-ΔCaspase-9 fusion protein, leading to apoptosis. FIG. 13B. Reporter assays were performed as in FIGS. 12B and C with cultures of HEK-293T cells transfected with the constitutive SRα-SEAP reporter (pBP046, 1 μg), a fusion of FRB_{L} (L2098) and CARD domain-deleted human ΔCaspase-9 (pBP0463, 2 μg) and FKBP expression constructs containing four tandem copies of FKBP12 (pBP722, 2 μg) or a control vector with one copy of FKBP (pS-SF1E).

[0054] FIGS. 14A-14B provide line graphs showing that heterodimerization of FRB_{L} scaffold with iCaspase9 induces cell death. Primary T cells from three different donors (307, 582, 584) were transduced with pBP0220-pSFG-iC9.T2A-ΔCD19, pBP0756-pSFG-iC9.T2A-ΔCD19.P2A-FRB_{L}, pBP0755-pSFG-iC9.T2A-ΔCD19.P2A-FRB_{L}2, or pBP0757-pSFG-iC9.T2A-ΔCD19.P2A-FRB_{L}3, containing iC9, CD19 marker, and 0-3 tandem copies of FRB_{L}, respectively. T Cells were plated with varying concentrations of rapamycin and after 24 and 48 hours cell aliquots were harvested, stained with APC-CD19 antibody and analyzed by flow cytometry. Cells were initially gated on live lymphocytes by FSC vs SSC. Lymphocytes were then plotted as a CD19 histogram and subgated for high, medium and low expression within the CD19⁺ gate. Line graphs represent the relative percentage of the total cell population that express high levels of CD19, normalized to the no “0” drug control. All data points were done in duplicates. FIG. 14A: donor 307, 24 hr; FIG. 14B: donor 582, 24 hr; FIG. 14C: donor 584 24 hr; FIG. 14D: donor 582 48 hr; FIG. 14E: donor 584 48 hr.

[0055] FIGS. 15A-15C provide line graphs and a schematic showing that rapamycin induces iC9 killing in the presence of tandem FRB_{L} domains. HEK-293 cells were transfected with 1 μg of SRα-SEAP constitutive reporter plasmid along with either negative (Neg) control, eGFP (pBP0047), iC9 (iC9/pBP0044) alone, or iC9 along with iMC.FRB_{L} (pBP0655)+anti-HER2.CAR.Fpk2 (pBP0488) or iMC.FRB_{L}2 (pBP0498)+anti-HER2.CAR.Fpk2. Cells were then plated with half-log dilutions of rimiducid or rapamycin and assayed for SEAP as previously described. Diminution of SEAP activity correlates with cell elimination. Schematic represents one possible rapamycin-mediated complex of signaling domains, which lead to Caspase-9 clustering and apoptosis. FIG. 15A: rimiducid; FIG. 15B: rapamycin; FIG. 15C: schematic.

[0056] FIGS. 16A and 16B are line graphs showing that tandem FKBP scaffold mediates FRB 2.Caspase activation in the presence of rapalogs. FIG. 16A. HEK-293 cells were transfected with 1 μg each of SRα-SEAP reporter plasmid, Δmyr.iMC.2A-anti-CD19.CAR.CD3ζ (pBP0608), and FRB_{L}2.Caspase-9 (pBP0467). After 24 hours, transfected cells were harvested and treated with varying concentrations of either rimiducid, rapamycin, or rapalog, C7-isopropoxy (IsoP)-rapamycin. After ON incubation, cell supernatants were assayed for SEAP activity, as previously described. FIG. 16B. Similar to the experiment described in (FIG. 16A), except that cells were transfected with a membrane-localized (myristoylated) iMC.2A-CD19.CAR.CD3ζ (pBP0609), instead of non-myristoylated Δmyr.iMC.2A-CD19.CAR.CD3ζ (pBP0608).

[0057] FIGS. 17A-17E provides line graphs and the results of FACs analysis showing that the iMC “switch”, FKBP2.MyD88.CD40, creates a scaffold for FRB_{L}2.Caspase9 in the presence of rapamycin, inducing cell death. FIG. 17A. Primary T cells (2 donors) were transduced with γ-RV, SFG-ΔMyr.iMC.2A-CD19 (from pBP0606) and SFG-FRB_{L}2.Caspase9.2A-Q.8stm.zeta (from pBP0668). Cells were plated with 5-fold dilutions of rapamycin. After 24 hours, cells were harvested and analyzed by flow cytometry for expression of iMC (anti-CD19-APC), Caspase-9 (anti-CD34-PE), and T cell identity (anti-CD3-PerCPCy5.5). Cells were initially gated for lymphocyte morphology by FSC vs SSC, followed by CD3 expression (˜99% of the lymphocytes). CD3⁺ lymphocytes were plotted for CD19 (Δmyr.iMC.2A-CD19) vs CD34 (FRB_{L}2.Caspase9.2A-Q.8stm.zeta) expression.

[0058] To normalize gated populations, percentages of CD34⁺CD19⁺ cells were divided by percent CD19⁺CD34⁻ cells within each sample as an internal control. Those values were then normalized to drug free wells for each transduction which were set at 100%. Similar analysis was applied to the Hi-, Med-, and Lo-expressing cells within the CD34⁺CD19⁺ gate. FIG. 17B. Representative example of how cells were gated for Hi, Med, and Lo expression. FIG. 17C. Representative scatter plots of final CD34 vs CD19 gates. As rapamycin increased, % CD34⁺CD19⁺ cells decreased, indicating elimination of cells. FIG. 17D and FIG. 17E. T cells from a single donor were transduced with ΔMyr.iMC.2A-CD19 (pBP0606) or FRB_{L}2.Caspase9.2A-Q.8stm.zeta (pBP0668). Cells were plated in IL-2-containing media along with varying amounts of rapamycin for 24 or 48 hrs. Cells were then harvested and analyzed, as above.

[0059] FIG. 18 Plasmid map of pBP0044: pSH1-iCaspase9 wt

[0060] FIG. 19 Plasmid map of pBP0463-pSH1-Fpk-Fpk′.LS.Fpk “.Fpk”.LS.HA

[0061] FIG. 20 Plasmid map of pBP0725-pSH1-FRBI.FRBI′.LS.FRBI″.FRBI″

[0062] FIG. 21 Plasmid map of pBP0465-pSH1-M-FRBI.FRBI′.LS.HA

[0063] FIG. 22 Plasmid map of pBP0721-pSH1-M-FRBI.FRBI′.LS.FRBI″.FRBI′″HA

[0064] FIG. 23 Plasmid map of pBP0722-pSH1-Fpk-Fpk′.LS.Fpk “.Fpk”.LS.HA

[0065] FIG. 24 Plasmid map of pBP0220-pSFG-iC9.T2A-ΔCD19

[0066] FIG. 25 Plasmid map of pBP0756-pSFG-iC9.T2A-dCD19.P2A-FRBI

[0067] FIG. 26 Plasmid map of pBP0755-pSFG-iC9.T2A-dCD19.P2A-FRBI2

[0068] FIG. 27 Plasmid map of pBP0757-pSFG-iC9.T2A-dCD19.P2A-FRBI3

[0069] FIG. 28 Plasmid map of pBP0655-pSFG-ΔMyr.FRBI.MC.2A-ΔCD19

[0070] FIG. 29 Plasmid map of pBP0498-pSFG-ΔMyr.iMC.FRBI2.P2A-ΔCD19

[0071] FIG. 30 Plasmid map of pBP0488-pSFG-aHER2.Q.8stm.CD3zeta.Fpk2

[0072] FIG. 31 Plasmid map of pBP0467-pSH1-FRBI′.FRBI.LS.ΔCaspase9

[0073] FIG. 32 Plasmid map of pBP0606-pSFG-k-ΔMyr.iMC.2A-ΔCD19

[0074] FIG. 33 Plasmid map of pBP0607-pSFG-k-iMC.2A-ΔCD19

[0075] FIG. 34 Plasmid map of pBP0668-pSFG-FRBIx2.Caspase9.2A-Q.8stm.CD3zeta

[0076] FIG. 35 Plasmid map of pBP0608-pSFG-ΔMyr.iMC.2A-ΔCD19.Q.8stm.CD3zeta

[0077] FIG. 36 Plasmid map of pBP0609: pSFG-iMC.2A-ΔCD19.Q.8stm.CD3zeta

[0078] FIG. 37A provides a schematic of rimiducid binding to two copies of a chimeric Caspase-9 polypeptide, each having a FKBP12 multimerizing region.

[0079] FIG. 37B provides a schematic of rapamycin binding to two chimeric Caspase-9 polypeptides, one of which has a FKBP12 multimerizing region and the other which has a FRB multimerizing region.

[0080] FIG. 37C provides a graph of assay results using these chimeric polypeptides.

[0081] FIG. 38A provides a schematic of rapamycin or rapalog binding to two chimeric Caspase-9 polypeptides, one of which has a FKBP12v36 multimerizing region and the other which has a FRB variant (FRB_{L}) multimerizing region. FIG. 38B provides a graph of assay results using this chimeric polypeptide.

[0082] FIG. 39A provides a schematic of rimiducid binding to two chimeric Caspase-9 polypeptides, each of which has a FKBP12v36 multimerizing region, and rapamycin binding to only one chimeric Caspase-9 polypeptide having a FKBP12v36 multimerizing region. FIG. 39B provides a graph of assay results comparing the effects of rimiducid and rapamycin.

[0083] FIG. 40A provides a schematic of rimiducid binding to two chimeric Caspase-9 polypeptides, each of which has a FKBP12v36 multimerizing region, and rapamycin binding to only one chimeric Caspase-9 polypeptide having a FKBP12v36 multimerizing region in the presence of a FRB multimerization polypeptide. FIG. 40B provides a graph of assay results using these polypeptides, comparing the effects of rimiducid and rapamycin.

[0084] FIG. 41 provides a plasmid map of pBP0463.pFRBI.LS.dCasp9.T2A.

[0085] FIG. 42 provides a plasmid map of pBP044-pSH1.iCasp9WT.

[0086] FIGS. 43A-43C Schematics of FwtFRBC9/MC.FvFv containing iFwtFRBC9 or iFRBFwtC9 (collectively, iRC9). In this version of the rapamycin inducible chimeric pro-apoptotic polypeptide, tandem FKBP.FRB (or FRB.FKBP) domains are fused to Δcaspase-9. Rapamycin or rapalogs can induce: 1) scaffold-induced dimerization of FKBP.FRB.ΔC9 (or FRB.FKBP.ΔC9) via the two FKBP domains fused to MC; 2) direct dimerization of FKBP.FRB.ΔC9 (or FRB.FKBP.ΔC9) to induce multimerization of the engineered caspase-9 fusion proteins.

[0087] FIGS. 44A-44C Expression profile of iMC+CARζ−T, i9+CARζ+MC, and FwtFRBC9/MC.FvFv T cells. PBMCs from four different donors were activated and transduced with iMC+CARζ-T (608), i9+CARζ+MC (844), and FwtFRBC9/MC.FvFv (1300)-containing vectors. For a vector schematic see FIG. 48. (A) Five days post-transduction, T cell lysates were subjected to Western blot analysis with antibodies to MyD88, caspase-9, and β-actin (which serves to demonstrate equal protein loading in all lanes). Note that iRC9 migrates the same as the endogenous caspase-9 and the added strength of the band denotes the level of the iRC9. (B) CAR expression were analyzed 4, 7, 12, 21, and 29 days post-transduction with anti-CD34-PE and anti-CD3-PerCPcy5 antibodies. (C) T cell viability from cells growing in culture was assessed 3, 5, 12, 21, and 29 days post-transduction using a Cellometer and AOPI viability dye.

[0088] FIGS. 45A-45C Rapamycin induces robust apoptosis activation in FwtFRBC9/MC. FvFv T cells. PBMCs from four different donors were activated and transduced with iMC+CARζ−T (608), i9+CARζ+MC (844), and FwtFRBC9/MC.FvFv (1300)-containing vectors. Five days post-transduction, T cells were seeded onto 96-well plates±rimiducid, ±rapamycin, and in the presence of 2 μM caspase 3/7 green reagent. (A) Plates were placed inside the IncuCyte to monitor green fluorescence over time, reflecting cleaved caspase 3/7 reagent. (B) After 48 hours, cells were stained with anti-CD34-PE (FL2) PI (FL4), and Annexin V-PacBlue (FL9), and cleaved caspase 3/7 was detected in the FL1 channel on a Galios cytometer. (C) Culture supernatant was also collected 48 hours after plating, and IL-2 and IL-6 cytokine production was analyzed by ELISA.

[0089] FIGS. 46A-46C Q-LEHD-OPh (SEQ ID NO: 2364) efficiently inhibits caspase activation induced by iC9 and iRC9. PBMCs were activated and transduced with i9+CARζ+MC (844) and FwtFRBC9/MC.FvFv (1300) vectors. Seven days post-transduction, T cells were seeded on 96-well plates (A) with increasing rimiducid/rapamycin concentration, (B) with increasing Q-LEHD-OPh (SEQ ID NO: 2364) concentration, and (C) with 20 nM rimiducid/rapamycin and increasing Q-LEHD-OPh (SEQ ID NO: 2364) concentration. Additionally, 2 μM caspase 3/7 green reagent was added to monitor caspase cleavage by IncuCyte.

[0090] FIGS. 47A-47D FRB_{L} and caspase-9 N405Q mutants reduce iRC9 activity. PBMCs were activated and transduced with plasmids 1300, 1308, 1316 and 1317. Five days post-transduction, T cells were seeded onto 96-well plates with 0 (A), 0.8 (B), 4 (C), and 20 nM (D) rapamycin. 2 μM caspase 3/7 green reagent was included to monitor caspase activation over time in the IncuCyte.

[0091] FIGS. 48A-48D iRC9 is a potent effector of rapamycin-induced apoptosis. (A) Schematic representation of iMC+CARζ−T, i9+CARζ+MC, iFRBC9 and MC.FvFv, and FwtFRBC9/MC.FvFv constructs. (B-D) Activated T cells were transduced with retrovirus encoding iMC+CARζ−T, i9+CARζ+MC, iFRBC9 and MC.FvFv, or FwtFRBC9/MC. FvFv and treated with no drug, 20 nM rapamycin or 20 nM rimiducid and cultured in the presence of 2.5 μM caspase 3/7 green reagent. The 96-well microplate was placed inside the IncuCyte to monitor activated caspase activity (green fluorescence) for 48 hours.

[0092] FIGS. 49A-49D iRC9 quickly and efficiently eliminates CAR-T cells in vivo. (A and B) NSG mice were injected i.v. with 10⁷ iMC+CARζ−T, i9+CARζ+MC, iFRBC9 and MC.FvFv or FwtFRBC9/MC.FvFv T cells co-transduced with GFP-Ffluc per mouse. Bioluminescence of CAR T cells was assessed 18 hours (−18 h) prior to drug treatment, immediately before drug treatment (0 h) and 4.5 h, 18 h, 27 h, and 45 h post-drug treatment. For mice receiving i9+CARζ+MC T cell injection, 5 mg/kg rimiducid was injected i.p. per mouse. For mice receiving iMC+CARζ−T, (iFRBC9 and MC.FvFv) and FwtFRBC9 MC.FvFv T cells, 10 mg/kg rapamycin was injected i.p. per mouse. At 45 h post-drug treatment, mice were euthanized and (C) blood and (D) spleen were collected for flow cytometry analysis with antibodies to hCD3, hCD34, and mCD45.

[0093] FIGS. 50A-50D The on- and off-switches in FwtFRBC9/MC.FvFv are efficiently controlled by rimiducid and rapamycin, respectively. PBMCs from donor 920 were activated and co-transduced with GFP-Ffluc and iMC+CARζ−T (189), i9+CARζ+MC (873), or FwtFRBC9/MC.FvFv (1308)-encoding vectors. Seven days post-transduction, T cells were seeded onto 96-well plates at 1:2 and 1:5 E:T ratios with HPAC-RFP cells in the presence of 0, 2, or 10 nM rimiducid and placed in the IncuCyte to monitor the kinetics of T cell-GFP and HPAC-RFP growth. (A & B) Two days post-seeding, culture supernatants were analyzed for IL-2, IL-6, and IFN-γ production by ELISA. At day 7, 10 nM rimiducid was added to i9+CARζ+MC culture and 10 nM rapamycin was added to GFP, iMC+CARζ−T and FwtFRBC9/MC.FvFv cultures followed by monitoring by IncuCyte until day 8. Numbers of HPAC-RFP and T cell-GFP at the E:T 1:2 ratio was analyzed using the basic analyzer software for the IncuCyte at day 7 (Ci) and day 8 with 0 nM suicide drug (Cii) and 10 nM suicide drug (Ciii). Similar analysis was also performed at the 1:5 E:T ratio (D). (Note: the y-axis in Ci and Di are at log-scale).

[0094] FIGS. 51A-51D iRC9 activates apoptosis via direct self-dimerization independent of scaffold-induced dimerization in FwtFRBC9/MC.FvFv. PBMCs from donor 920 were activated and transduced with various vectors de in (A). (B) Protein expression of the CAR T cells was analyzed by Western blot using antibodies to hMyD88, hCaspase-9 and β-actin. (C-D) Five days post-transduction, T cells were seeded on 96-well plates with increasing rapamycin concentrations. Additionally, 2 μM caspase 3/7 green reagent was added to monitor caspase cleavage by IncuCyte. Line graphs depict caspase activation over 24 hours post-rapamycin treatment of MC variants (C) and FRB.FKBP.ΔC9 versus FKBP.FRB.ΔC9 iRC9 (D).

[0095] FIGS. 52A-52B Relatively high (>100 nM) rimiducid concentration is required to activate iRC9. 293 cells were seeded at 300,000 cells/well in a 6-well plate and allowed to grow for 2 days. After 48 h, cells were transfected with 1 μg of experimental plasmids. Cells were harvested 48 h after transfection and diluted 2.5× their original volume. (A) For the Incucyte/casp3/7 assay, 50 μl of cells were plated per well including either rimiducid or rapamycin drug and caspase 3/7 green reagent (2.5 UM final concentration). (B) For the SEAP assays, 100 μl of cells were plated in a 96-well plate with (half-log) rimiducid (or rapamycin) drug dilutions and ˜ 18 h after drug exposure, plates were heat-inactivated before substrate (4-MUP) addition.

[0096] FIGS. 53A-53B Schematic of MC-Rap, a CAR-costimulation strategy inducible with rapamycin or rapalogs. In this version of an inducible costimulatory switch, tandem FKBP.FRB (or FRB.FKBP) domains are fused to MyD88-CD40 (MC) (right). Rapamycin or rapalogs can induce direct dimerization of FKBP in MC-FKBP-FRB (or MC-FRB-FKBP) with FRB in a second molecule of MC-FKBP-FRB to induce multimerization of the engineered MC fusion proteins. Note that FRB can be present as the wild-type or as a mutant such as FRB_{L} inducible with rapalogs that have reduced affinity for mTOR. This strategy is contrasted with homodimerization directed by rimiducid and FKBPᵥ₃₆ in the iMC+CARζ platform (left).

[0097] FIGS. 54A-54B Induction of MC costimulatory activity with a rapalog and a MC-Rap-CAR. Human PBMCs were activated and transduced with iMC+CARζ constructs (BP0774 and BP1433), MC-rap-CAR (BP1440) or an noninducible MC only construct (BP1151). Cells were allowed to rest for 6 days then aliquots were stimulated with rimiducid or the rapalog C7-dimethoxy-7-isobutyloxyrapamycin. Supernatant media was harvested 24 hours later and the amount of secreted IL-6 determined by ELISA as an indicator of MC activity. MC activity in iMC+CARζ−T cells is stimulated strongly with rimiducid and not with the rapalog. MC activity in MC-rap-T cells is not stimulated with rimiducid because FKBP12 in pBP1440 is the wild-type rather than the rimiducid sensitive allele V36. MC-Rap activity is instead strongly responsive to isobutyloxyrapamycin to a degree similar to the iMC+CARζ−Ts with rimiducid.

[0098] FIGS. 55A-55B Protein expression of MC from iMC+CARζ. Human PBMCs were activated and transduced with iMC+CARζ constructs (BP0774, BP1433 and BP1439), MC-rap-CAR (BP1440) or an noninducible MC only constructs (BP1151 oriented at the 5′ end of the retrovirus and 1414 oriented 3′ relative to the CAR). Cells were expanded for 2 weeks then extracts were prepared for SDS-PAGE. Western blots were probed with antibodies to MyD88. The MC-FKBP-FRB fusion protein was expressed at a similar level to the MC-FKBPᵥ fusions from iMC+CARζ constructs.

[0099] FIGS. 56A-56B Responsiveness of MC-rap to dosage of rapamycin and rapamycin analog. 293T cells were transfected with 1 μg of reporter construct NF-κB SeAP and 4 μg of the iMC+CARζ construct pBP0774 or the MC-rap-CAR construct pBP1440 using the GeneJuice protocol (Novagen). 24 hours post transfection cells were split to 96 well plates and incubated with increasing concentrations of rimiducid, rapamycin or isobutyloxyrapamycin. After 24 hours of further incubation SeAP activity was determined from cell supernatants. NF-κB reporter activity was stimulated with a subnanomolar EC50 with both the rapalog and rapamycin while up to 50 nM rimiducid could not direct MC-rap dimerization.

[0100] FIGS. 57A-57B Schematic of MC-Rap, a CAR-costimulation strategy inducible with rapamycin or rapalogs. In FwtFRBC9/MC.FvFv (left) tandem FKBP.FRB (or FRB.FKBP) domains are fused to Caspase 9 and tandem Fᵥ moieties are fused to MC. Caspase 9 can be activated by homodimerization through rapamycin directed FRB and wild-type FKBP ligation or by scaffolding with iMC. Rimiducid dimerizes FKBPᵥ₃₆ moieties to activate MC. FRBFwtMC/FvC9 (right) uses rapamycin or rapalogs can to induce MC-rap while iC9 induced by rimiducid for a cell suicide switch.

[0101] FIGS. 58A-58C FRBFwtMC/FvC9 can effectively control tumor growth but is abrogated by activation of iC9 with rimiducid. PBMCs from donor 676 were activated and transduced with a CD19 directed i9+CARζ+MC (BP0844), FRBFwtMC/FvC9 (BP1460) or FwtFRBC9/MC.FvFv (BP1300). Seven days post-transduction, T cells were seeded onto 24-well plates at 1:5 E:T ratios with Raji-GFP cells in the presence of 2 nM rimiducid, 2 nM isobutyloxyrapamycin or 2 nM rapamycin. After seven days of incubation the live cells were analyzed for the proportion of GFP labeled tumor cells (left) and for the proportion of total T cells (CD3⁺, right) and transduced CAR-T cells (CD34, not shown). Rimiducid caused cell death of CAR-T cells with i9+CARζ+MC, or FRBFwtMC/FvC9 and tumor cells dominate the culture while rapamycin or isobutyloxyrapamycin cause cell death with FwtFRBC9/MC.FvFv.

[0102] FIG. 59 Schematic of plasmid pBP1300-pSFG-FKBP.FRB.ΔC9.T2A-αCD19.Q.CD8stm.ζ.P2A-iMC

[0103] FIG. 60 Schematic of plasmid pBP1308-pSFG-FKBP.FRB.ΔC9.T2A-αPSCA.Q.CD8stm.ζ.P2A-iMC

[0104] FIG. 61 Schematic of plasmid pBP1310-pSFG.FRB.FKBP.ΔC9.T2A-ΔCD19 FIG. 62 Schematic of plasmid pBP1311-pSFG.FKBP.FRB.ΔC9.T2A-ΔCD19 FIG. 63 Schematic of plasmid pBP1316-pSFG-FKBP.FRB_{L}.ΔC9.T2A-αPSCA.Q.CD8stm.ζ.P2A-iMC

[0105] FIG. 64 Schematic of plasmid pBP1317-pSFG-FKBP.FRB.ΔC9_{Q}.T2A-αPSCA.Q.CD8stm.ζ.P2A-iMC

[0106] FIG. 65 Schematic of plasmid pBP1319-pSFG-FKBP.FRB.ΔC9.T2A-αPSCA.Q.CD8stm.ζ.P2A-MC.FKBPᵥ

[0107] FIG. 66 Schematic of plasmid pBP1320-pSFG-FKBP.FRB.ΔC9.T2A-αPSCA.Q.CD8stm.ζ.P2A-MC

[0108] FIG. 67 Schematic of plasmid pBP1321-pSFG-FKBP.FRB.ΔC9.T2A-αPSCA.Q.CD8stm.ζ.P2A-MC.FKBPᵥ.FKBP

[0109] FIG. 68A provides a graph of drug-dependent CAR-T cell killing of tumor cells. FIG. 68B provides schematics of inducible MyD88-CD40 polypeptides.

[0110] FIG. 69A provides a schematic representation of retroviral vectors that express inducible MyD88-CD40 polypeptides.

[0111] FIG. 69B provides a bar graph of results of a reporter assay of costimulatory signaling.

[0112] FIG. 69C provides a bar graph of CAR-T cell cytokine secretion.

[0113] FIG. 69D provides a graph of a CAR-T cell killing assay.

[0114] FIG. 70A provides a schematic representation of retroviral vectors that express inducible MyD88-CD40 polypeptides.

[0115] FIG. 70B provides a graph of a reporter assay of costimulatory signaling.

[0116] FIG. 70C provides a graph of a PSCA-CAR-T cell killing assay.

[0117] FIG. 70D provides a graph of a PSCA CAR-T cell killing assay.

[0118] FIG. 70E provides a graph of a HER2-CAR-T cell killing assay.

[0119] FIG. 70F provides a graph of a HER2-CAR-T cell killing assay.

[0120] FIG. 70G provides a graph of a HER2-CAR-T cell killing assay.

[0121] FIG. 71A provides a graph of apoptosis activity directed by inducible Caspase-9 in the presence of rimiducid.

[0122] FIG. 71B provides a graph of apoptosis activity directed by inducible Caspase-9 in the presence of C7-isobutyloxyrapamycin.

[0123] FIG. 72A provides a schematic of polypeptides expressed on a single vector, including a CAR polypeptide, a iRC9 polypeptide, and an iMC polypeptide.

[0124] FIG. 72B provides schematics of the polypeptides expressed on two separate vectors.

[0125] FIG. 73A provides a schematic of inducible Caspase 9 retroviral constructs.

[0126] FIG. 73B provides data showing fluorescent conversion of cells that express Caspase 9 in the presence of rapamycin.

[0127] FIG. 73C provides a graph of relative apoptosis activity of FIG. 73B.

[0128] FIG. 73D provides a Western blot of Caspase-9 transgene expression in T cells.

[0129] FIG. 74A provides a graph of IL-6 secretion in the presence of rimiducid.

[0130] FIG. 74B provides a graph of IL-2 secretion in the presence of rimiducid.

[0131] FIG. 74C provides a graph of IFN-γ secretion in the presence of rimiducid.

[0132] FIG. 74D provides a graph of CAR-T cell killing in the presence of rimiducid.

[0133] FIG. 74E provides a Western blot of expression of iMC and iRC9.

[0134] FIG. 75A provides cell sorting results from non-transduced T cells, or T cells transduced with retroviruses that encode iRC9, IMC, and CAR, as indicated.

[0135] FIG. 75B provides a graph of the results of FIG. 75A.

[0136] FIG. 75C provides cell sorting results of an apoptosis assay.

[0137] FIG. 75D provides a graphical representation of an apoptosis assay.

[0138] FIG. 76A provides micrographs of tumor bearing animals determined by bioluminescence imaging.

[0139] FIG. 76B provides graphs of average tumor growth.

[0140] FIG. 76C provides graphs of human T cells in spleens at termination.

[0141] FIG. 76D provides graphs of vector copy number.

[0142] FIG. 77A provides micrographs of tumor-bearing animals determined by bioluminescence imaging.

[0143] FIG. 77B provides graphs of average radiance.

[0144] FIG. 77C provides a graph of a Kaplan-Meier analysis from FIG. 77A.

[0145] FIG. 77D provides a representative FACS analysis at termination.

[0146] FIG. 78A provides micrographs of tumor-bearing animals determined by bioluminescence imaging.

[0147] FIG. 78B provides graphical representations of the average calculated radiance from FIG. 78A.

[0148] FIG. 78C provides a graph of human T cell counts in mouse spleens.

[0149] FIG. 79A provides micrographs of tumor-bearing animals determined by bioluminescence imaging.

[0150] FIG. 79B provides a graphical representation of the average calculated radiance from FIG. 79A.

[0151] FIG. 79C provides a graph of the number of human T cells in mouse spleens at termination.

[0152] FIG. 79D provides graphs of vector copy number from DNA derived from mouse spleens.

[0153] FIG. 80 provides a plasmid map of pBP1151-pSFG-MC-T2A-αCD19.Q.CD8stm.ζ

[0154] FIG. 81 provides a plasmid map of pBP1152-pSFG-MC-T2A-αCD19.Q.CD8stm.ζ

[0155] FIG. 82 provides a plasmid map of pBP1414-pSFG-αCD19.Q.CD8stm.ζ-P2A-MC

[0156] FIG. 83 provides a plasmid map of pBP1414-pSFG-αCD19.Q.CD8stm.ζ-P2A-MC

[0157] FIG. 84 provides a plasmid map of pBP1433-pSFG-Fv-Fv-MC-T2A-αCD19.Q.CD8stm.ζ

[0158] FIG. 85 provides a plasmid map of pBP1439-pSFG-MC.FKBPᵥ-T2A-αCD19.Q.CD8stm.ζ

[0159] FIG. 86 provides a plasmid map of pBP1440-pSFG-FKBPv.ΔC9.T2A-αCD19.Q.CD8stm.ζ.T2A.P2A-MC.FKBP_{wt}.FRB_{L}

[0160] FIG. 87 provides a plasmid map of pBP1460-pSFG-FKBPv.ΔC9.T2A-αCD19.Q.CD8stm.ζ.T2A.P2A-MC.FKBP_{wt}.FRB_{L}

[0161] FIG. 88 provides a plasmid map of pBP1293-pSFG-iMC.T2A-αhCD33 (My9.6).ζFIG. 89 provides a plasmid map of pBP1296-pSFG-iMC.T2A-αhCD123 (32716).ζFIG. 90 provides a plasmid map of pBP1327-pSFG-FRB.FKBPᵥ.ΔC9.2A-ΔCD19 FIG. 91 provides a plasmid map of pBP1328-pSFG-FKBPᵥ.FRB.ΔC9.2A-ΔCD19 FIG. 92 provides a plasmid map of pBP1351-pSFG-SP163.FKBP.FRB.ΔC9.T2A-αhPSCA.Q.CD8stm.ζ.2A-iMC

[0162] FIG. 93 provides a plasmid map of pBP1373-pSFG-sp-FKBP.FRB.ΔC9.T2A-αhPSCAscFv.Q.CD8stm.ζ

[0163] FIG. 94 provides a plasmid map of pBP1385-pSFG-FRB.FKBP.ΔC9.T2A-ΔCD19 FIG. 95 provides a plasmid map of pBP1455-pSFG-MC.FKBP_{wt}.FRB_{L}. T2A-αPSCA.Q.CD8stm.ζFIG. 96 provides a plasmid map of pBP1466-pSFG-FKBPᵥ.ΔC9.T2A-PSCA.Q.CD8stm.ζ.P2A-MC.FKBP_{wt}.FRB_{L}

[0164] FIG. 97 provides a plasmid map of pBP1474-pSFG-FKBPᵥ.ΔC9.T2A-αHER2.Q.CD8stm.ζFIG. 98 provides a plasmid map of pBP1475-pSFG-FKBPᵥ.ΔC9.T2A-αPSCA.Q.CD8stm.ζFIG. 99 provides a plasmid map of pBP1488-pSFG-FRB_{L}.FKBP_{wt}.MC-T2A-αPSCA.Q.CD8stm.ζFIG. 100 provides a plasmid map of pBP1491-pSFG-FKBPᵥ.ΔC9.P2A.MC.FKBP_{wt}.FRB_{L}. T2A-αHER2.Q.CD8stm.ζ

[0165] FIG. 101 provides a plasmid map of pBP1493-pSFG-MC.FKBP_{wt}.FRB_{L}-P2A.FKBPᵥ.ΔC9.T2A-αHER2.Q.CD8stm.ζ

[0166] FIG. 102 provides a plasmid map of pBP1494-pSFG-MC.FKBP_{wt}.FRB_{L}-P2A.FKBPᵥ.ΔC9.T2A-PSCA.Q.CD8stm.ζ

[0167] FIG. 103 provides a plasmid map of pBP1757-pSFG-FRB_{L}.FKBP_{wt}. MC-P2A.FKBPᵥ.ΔC9.T2A-αPSCA.Q.CD8stm.ζ

[0168] FIG. 104 provides a plasmid map of pBP1759-pSFG-FRB_{L}.FKBP_{wt}.MC-P2A.FKBPᵥ.ΔC9.T2A-αHER2.Q.CD8stm.ζ

[0169] FIG. 105 provides a plasmid map of pBP1796-pSFG-FKBP_{wt}.FRB_{L}-MC. P2A.FKBPᵥ.ΔC9.T2A-αPSCA.Q.CD8stm.ζ

[0170] FIG. 106A provides a schematic of various inducible chimeric Caspase-9 constructs. FIG. 106B provides graphs of caspase activation assays. FIG. 106C is a photo of a Western blot showing protein expression.

[0171] FIG. 107A provides graphs of caspase activity. FIG. 107B provides graphs of SEAP activity.

[0172] FIG. 108A provides graphs of SEAP activity. FIG. 108B provides graphs of caspase activity. FIG. 108C provides a Western blot showing protein expression.

[0173] FIG. 109A provides a FACS analysis of transduction efficiency. FIG. 109B provides graphs of bioluminescence. FIG. 109C provides photos of bioluminescence in mice. FIG. 109D provides graphs of FACs analysis of mice spleen cells.

[0174] FIG. 110A provides a FACs analysis of transduction efficiency. FIG. 110B provides graphs of bioluminescence. FIG. 110C provides photos of bioluminescence in mice. FIG. 110D provides a graph of FACs analysis of mice spleen cells.

[0175] FIG. 111 provides a schematic of a vector encoding a CD123-CAR-ζ and an iMC polypeptide.

[0176] FIG. 112A provides a graph of IL-6 production; FIG. 112 B provides a graph of IL-2 production; FIG. 112C provides a graph of total green fluorescence intensity of THP1-GP.Fluc, and FIG. 112D provides a graph of number of HPAC-RFP cells.

[0177] FIG. 113A provides a graph of IL-2 production; FIG. 113B provides a graph of THP1-FP.Fluc cells; FIG. 113C provides a graph of T cells-RFP; FIG. 113D provides a graph of THP1-GFP.Fluc green fluorescence; and FIG. 113E provides a graph of T cell-RFP red fluorescence.

[0178] FIG. 114A provides a FACs analysis; FIG. 114B provides a schematic of tumor growth via IVIS monitoring; FIG. 114C provides photos of bioluminescence in mice.

[0179] FIG. 115A provides photos of bioluminescence in mice; FIG. 115B provides a graph of vector copy number.

[0180] FIG. 116 provides a schematic of inducible MC expressed with a recombinant TCR.

[0181] FIG. 117A provides a schematic of a PRAME TCR polypeptide; FIG. 117B provides a schematic of an iMC polypeptide; FIG. 117C provides a schematic of a PRAME-TCR polypeptide co-expressed with an iMC polypeptide; FIG. 117D provides a graph of IL-2 production, items listed along the X-axis are in the same order as the legend.

[0182] FIG. 118A provides a schematic of trans-well assay set-up; FIG. 118B provides a graph of HLA-A, B, C levels.

[0183] FIG. 119A provides a graph of specific lysis. FIG. 119B provides a graph of IL-2 production.

[0184] FIG. 120A provides a graph of specific lysis; FIG. 120 B provides a graph of IL-2 production.

[0185] FIG. 121A provides a schematic of an immune-deficient NSG xenographt model; FIG. 121B provides graphs of average radiance in non-transduced and transduced cells; FIG. 121C provides a graph of the number of Vβ1⁺CD8⁺ cells/spleen; FIG. 121D provides a graph of the number of Vβ1⁺CD8⁺ cells/spleen.

### DETAILED DESCRIPTION

[0186] As a mechanism to translate information from the external environment to the inside of the cell, regulated protein-protein interactions evolved to control most, if not all, signaling pathways. Transduction of signals is governed by enzymatic processes, such as amino acid side chain phosphorylation, acetylation, or proteolytic cleavage that lack intrinsic specificity. Furthermore, many proteins or factors are present at cellular concentrations or at subcellular locations that preclude spontaneous generation of a sufficient substrate/product relationship to activate or propagate signaling. An important component of activated signaling is the recruitment of these components to signaling “nodes” or spatial signaling centers that efficiently transmit (or attenuate) the pathway via appropriate upstream signals.

[0187] As a tool to artificially isolate and manipulate individual protein-protein interactions and hence individual signaling proteins, chemically induced dimerization (CID) technology was developed to impose homotypic or heterotypic interactions on target proteins to reproduce natural biological regulation. In its simplest form, a single protein would be modified to contain one or more structurally identical ligand binding domains, which would then be the basis of homodimerization or oligomerization, respectively, in the presence of a cognate homodimeric ligand (Spencer D M et al (93) Science 262, 1019-24). A slightly more complicated version of this concept would involve placing one or more distinct ligand binding domains on two different proteins to enable heterodimerization of these signaling molecules using small molecule, heterodimeric ligands that bind to both distinct domains simultaneously (Ho S N et al (96) Nature 382, 822-6). This drug-mediated dimerization creates a very high local concentration of ligand binding-domain-tagged components sufficient to permit their induced or spontaneous assembly and regulation.

[0188] In some embodiments, provided herein are methods to induce multimerization of proteins. In this case, two or more heterodimer ligand binding regions (or “domains”) in tandem are used as a “molecular scaffold” to dimerize or oligomerize a second, signaling domain-containing protein that is fused to one or more copies of the second binding site for the heterodimeric ligand. The molecular scaffold can be expressed as an isolated multimer of ligand binding domains (FIG. 8), either localized within the cell or unlocalized (FIG. 8B, 8C), or it can be attached to another protein that provides a structural, signaling, cell marking, or more complex combinatorial function (FIG. 9). By “scaffold” is meant a polypeptide that comprises at least two, for example, two or more, heterodimer ligand binding regions; in certain examples the ligand binding regions are in tandem, that is, each ligand binding region is located directly proximal to the next ligand binding region. In other examples, each ligand binding region may be located close to the next ligand binding region, for example, separated by about 1, 2, 3, 4, 5, 6, 7, 8, 9, 10, 11, 12, 13, 14, 15, 16, 17, 18, 19, 20, 25, 30, 35, 40, 45, 50, 55, 60, 65, 70, 75, 80 or more amino acids, but retain the scaffold function of dimerization of an inducible caspase molecule in the presence of a dimerizer. A scaffold may comprise, for example, at least 2, 3, 4, 5, 6, 7, 8, 9, 10, 11, 12, 13, 14, 15, 16, 17, 18, 19, 20 or more ligand binding regions, and may also be linked to another polypeptide, such as, for example, a marker polypeptide, a costimulating molecule, a chimeric antigen receptor, a T cell receptor, or the like.

[0189] In some embodiments, the first polypeptide consists essentially of at least two, three, four, five, six, seven, eight, nine, ten, 11, 12, 13, 14, 15, 16, 17, 18, 19, or 20 units of the first multimerizing region. In some embodiments, first polypeptide consists essentially of the scaffold region. In some embodiments, the first polypeptide consists essentially of a membrane association region or a membrane targeting region. By “consists essentially of” is meant that the scaffold units or the scaffold may be alone, can optionally include linker polypeptides at either terminus of the scaffold, or between the units, and can optionally include small polypeptides such as, for example stem polypeptides as shown in FIGS. 10B, 10C, 10D, and 10E.

[0190] In one example, a tandem multimer of the ˜89 aa FK506-rapamycin binding (FRB) domain derived from the protein kinase mTOR (Chen J et al (95) PNAS, 92, 4947-51) is used to recruit multiple FKBPᵥ36-fused Caspase-9 (iC9/iCaspase-9) in the presence of rapamycin or a rapamycin-based analogue (“rapalog”) (Liberles S D (97) PNAS 94, 7825-30; Rivera V M (96) Nat Med 2, 1028-1032, Stankunas K (03) Mol Cell 12, 1615-24; Bayle J H (06) Chem & Biol, 13, 99-107) (FIGS. 1-3). This recruitment leads to spontaneous caspase dimerization and activation.

[0191] In a second example, the tandem FRB domains are fused to a chimeric antigen receptor (CAR) and this provides rapalog-driven iC9 activation to cells expressing both fusion proteins (FIG. 15, inset).

[0192] In a third example, the polarity of the two proteins are reversed so that two or more copies of FKBP12 are used to recruit and multimerize FRB-modified signaling molecules in the presence of rapamycin (FIG. 8C, 9A).

[0193] In some examples, a chimeric polypeptide may comprise a single ligand binding region, or a scaffold comprising more than one ligand binding region may be, where the chimeric polypeptide comprises a polypeptide such as, for example, a MyD88 polypeptide, a truncated MyD88 polypeptide, a cytoplasmic CD40 polypeptide, a chimeric MyD88/cytoplasmic CD40 polypeptide or a chimeric truncated MyD88/cytoplasmic CD40 polypeptide.

[0194] By MyD88, or MyD88 polypeptide, is meant the polypeptide product of the myeloid differentiation primary response gene 88, for example, but not limited to the human version, cited as ncbi Gene ID 4615. By “truncated,” is meant that the protein is not full length and may lack, for example, a domain. For example, a truncated MyD88 is not full length and may, for example, be missing the TIR domain. An example of a truncated MyD88 polypeptide amino acid sequence is presented as SEQ ID NO: 969. By a nucleic acid sequence coding for “truncated MyD88” is meant the nucleic acid sequence coding for the truncated MyD88 peptide, the term may also refer to the nucleic acid sequence including the portion coding for any amino acids added as an artifact of cloning, including any amino acids coded for by the linkers. It is understood that where a method or construct refers to a truncated MyD88 polypeptide, the method may also be used, or the construct designed to refer to another MyD88 polypeptide, such as a full length MyD88 polypeptide. Where a method or construct refers to a full length MyD88 polypeptide, the method may also be used, or the construct designed to refer to a truncated MyD88 polypeptide.

[0195] In the methods herein, the CD40 portion of the peptide may be located either upstream or downstream from the MyD88 or truncated MyD88 polypeptide portion.

[0196] In a fourth example, unstable FRB variants (e.g., FRB_{L}2098) are used to destabilize the signaling molecule prior to rapalog administration (Stankunas K (03) Mol Cell 12, 1615-24; Stankunas K (07) ChemBioChem 8, 1162-69) (FIG. 9, 10). Following rapalog exposure, the unstable fusion molecule is stabilized leading to aggregation as before, but with lower background signaling.

[0197] The use of ligands to direct signaling proteins may be generally applied to activate or attenuate many signaling pathways. Examples are provided herein that demonstrate a utility of the approach by controlling apoptosis or programmed cell death with the “initiating caspase”, Caspase-9 as the primary target. Control of apoptosis by dimerization of proapoptotic proteins with widely available rapamycin or more proprietary rapalogs, should permit an experimenter or clinician to tightly and rapidly control the viability of a cell-based implant that displays unwanted effects. Examples of these effects include, but are not limited to, Graft versus Host (GvH) immune responses against off-target tissue or excessive, uncontrolled growth or metastasis of an implant. Rapid induction of apoptosis will severely attenuate the unwanted cell's function and permit the natural clearance of the dead cells by phagocytic cells, such as macrophages, without undue inflammation.

[0198] Apoptosis is tightly regulated and naturally uses scaffolds, such as Apaf-1, CRADD/RAIDD, or FADD/Mort1, to oligomerize and activate the caspases that can ultimately kill the cell. Apaf-1 can assemble the apoptotic protease Caspase-9 into a latent complex that then forms an active oligomeric apoptosome upon recruitment of cytochrome C to the scaffold. The key event is oligomerization of the scaffold units causing dimerization and activation of the caspase. Similar adapters, such as CRADD, can oligomerize Caspase-2, leading to apoptosis. The compositions and methods provided herein use, for example, multimeric versions of the ligand binding domains FRB or FKBP to serve as scaffolds that permit the spontaneous dimerization and activation of caspase units present as FRB or FKBP fusions upon recruitment with rapamycin.

[0199] Using certain of the methods provided in the examples herein, caspase activation occurs only when rapamycin or rapalogs are present to recruit the FRB or FKBP-fused caspase to the scaffold. In these methods, the FRB or FKBP polypeptides must be present as a multimeric unit not as monomers to drive FKBP- or FRB-caspase dimerization (except when FRB-Caspase-9 is dimerized with FKBP-Caspase-9). The FRB or FKBP-based scaffold can be expressed in a targeted cell as a fusion with other proteins and retains its capacity to serve as a scaffold to assemble and activate proapoptotic molecules. The FRB or FKBP scaffold may be localized within the cytosol as a soluble entity or present in specific subcellular locales, such as the plasma membrane through targeting signals. The components used to activate apoptosis and the downstream components that degrade the cell are shared by all cells and across species. With regard to Caspase-9 activation, these methods can be broadly utilized in cell lines, in normal primary cells, such as, for example, but not limited to, T cells, or in cell implants.

[0200] In certain examples of the direct dimerization of FRB-Caspase with FKBP-Caspase with rapamycin to direct apoptosis, it was shown that FKBP-fused Caspases can be dimerized by homodimerizer molecules, such as AP1510, AP20187 or AP1903 (FIG. 6 (right panel), 10A (schematic) (A similar proapototic switch can be directed via heterodimerization of a binary switch using rapamycin or rapalogs by coexpression of a FRB-Caspase-9 fusion protein along with FKBP-Caspase-9, leading to homodimerization of the caspase domains within the chimeric proteins (FIG. 8A (schematic), 10B (schematic), (11).

[0201] As used herein, the use of the word “a” or “an” when used in conjunction with the term “comprising” in the claims and/or the specification may mean “one,” but it is also consistent with the meaning of “one or more,” “at least one,” and “one or more than one.” Still further, the terms “having”, “including”, “containing” and “comprising” are interchangeable and one of skill in the art is cognizant that these terms are open ended terms.

[0202] The following table outlines the nature of some of the nomenclature and acronyms for the switches discussed in this and the following examples.

| Short Name | Molecular Construct | Other Reference |
|---|---|---|
| iC9, FvC9, iCasp-9, | FKBPvΔC9 | FKBP12v36-Caspase-9, |
| iCaspase-9 | | CaspaCIDe |
| FRB.C9, FRB.Casp-9 | FRBΔC9 | RapaCIDe-1.0 |
| iC9 + FRB.C9 | FKBP12ΔC9 + | RapaCIDe-2.0 |
| | FRBΔC9 | |
| iRC9, FwtFRB.C9 | FKBP.FRBΔC9 | FKBP12-FRBΔC9, |
| | | RapaCIDe-3.0, FFC9, |
| | | iFFC9 |
| iRC9, FRB.FwtC9 | FRB.FKBPΔC9 | FRB-FKBP12ΔC9, |
| | | RapaCIDe-3.1, FFC9, |
| | | iFFC9 |
| iMC, MC.FvFv | MC.FKBPv.FKBPv | MC. FKBP12v36- |
| | | FKBP12v36, inducible |
| | | MyD88/CD40, FvFvMC |
| | | (variant), FFMC, iFFMC |
| iRMC, FRB.FwtMC | FRB.FKBPwtMC or | FRBFwtMC or |
| | FKBPwt.FRBMC | FwtFRBMC, |
| | | MC-Rap |
| iRMC, MC.FRB.Fwt | MC.FRB.FKBPwt or | MC.FRBFwt or |
| | MC.FKBPwt.FRB | MC.FwtFRB, |
| | | MC-Rap |
| iC9 + CARζ + iRMC | FvΔC9 + | DragCAR-3.0, variant |
| | CARζ + | domain |
| | FRB.FwtMC | permutations |
| iC9 + CARζ + MC | FvΔC9 + | CIDeCAR |
| | CARζ-2A-MC | |
| iMC + CARζ | MC.FvFv + | GoCAR |
| | CARζ | |
| iRmC9, FvFRB.C9 | FKBPv.FRBΔC9 | Dual-switch inducible |
| | | caspase, |
| | | FKBP12v36FRBΔC9, |
| | | RipaCIDe |
| iRmC9, FRB.FvC9 | FRB.FKBPvΔC9 | Dual-switch inducible |
| | | caspase, |
| | | FRB.FKBP12v36ΔC9, |
| | | RipaCIDe |
| FRB.C9 + iMC + CARζ | FRBΔC9 + | DragCAR-1.0 |
| | MC.FvFv + | |
| | CARζ | |
| iRC9 + iMC + CARζ | Fwt.FRBΔC9 + | DragCAR-2.0 + variant |
| | MC.FvFv | domain permutations |

[0203] The term “allogeneic” as used herein, refers to HLA or MHC loci that are antigenically distinct.

[0204] Thus, cells or tissue transferred from the same species can be antigenically distinct. Syngeneic mice can differ at one or more loci (congenics) and allogeneic mice can have the same background.

[0205] The term “antigen” as used herein is defined as a molecule that provokes an immune response. This immune response may involve either antibody production, or the activation of specific immunologically-competent cells, or both.

[0206] An “antigen recognition moiety” may be any polypeptide or fragment thereof, such as, for example, an antibody fragment variable domain, either naturally-derived, or synthetic, which binds to an antigen. Examples of antigen recognition moieties include, but are not limited to, polypeptides derived from antibodies, such as, for example, single-chain variable fragments (scFv), Fab, Fab′, F(ab′)₂, and Fv fragments; polypeptides derived from T Cell receptors, such as, for example, TCR variable domains; and any ligand or receptor fragment that binds to the extracellular cognate protein.

[0207] The term “cancer” as used herein is defined as a hyperproliferation of cells whose unique trait-loss of normal controls-results in unregulated growth, lack of differentiation, local tissue invasion, and metastasis. Examples include but are not limited to, melanoma, non-small cell lung, small-cell lung, lung, hepatocarcinoma, leukemia, retinoblastoma, astrocytoma, glioblastoma, gum, tongue, neuroblastoma, head, neck, breast, pancreatic, prostate, renal, bone, testicular, ovarian, mesothelioma, cervical, gastrointestinal, lymphoma, brain, colon, sarcoma or bladder.

[0208] Donor: The term “donor” refers to a mammal, for example, a human, that is not the patient recipient. The donor may, for example, have HLA identity with the recipient, or may have partial or greater HLA disparity with the recipient.

[0209] Haploidentical: The term “haploidentical” as used with reference to cells, cell types and/or cell lineages, herein refers to cells sharing a haplotype or cells having substantially the same alleles at a set of closely linked genes on one chromosome. A haploidentical donor does not have complete HLA identity with the recipient, there is a partial HLA disparity.

[0210] Blood disease: The terms “blood disease”, “blood disease” and/or “diseases of the blood” as used herein, refers to conditions that affect the production of blood and its components, including but not limited to, blood cells, hemoglobin, blood proteins, the mechanism of coagulation, production of blood, production of blood proteins, the like and combinations thereof. Non-limiting examples of blood diseases include anemias, leukemias, lymphomas, hematological neoplasms, albuminemias, haemophilias and the like.

[0211] Bone marrow disease: The term “bone marrow disease” as used herein, refers to conditions leading to a decrease in the production of blood cells and blood platelets. In some bone marrow diseases, normal bone marrow architecture can be displaced by infections (e.g., tuberculosis) or malignancies, which in turn can lead to the decrease in production of blood cells and blood platelets. Non-limiting examples of bone marrow diseases include leukemias, bacterial infections (e.g., tuberculosis), radiation sickness or poisoning, apnocytopenia, anemia, multiple myeloma and the like.

[0212] T cells and Activated T cells (include that this means CD3⁺ cells): T cells (also referred to as T lymphocytes) belong to a group of white blood cells referred to as lymphocytes. Lymphocytes generally are involved in cell-mediated immunity. The “T” in “T cells” refers to cells derived from or whose maturation is influenced by the thymus. T cells can be distinguished from other lymphocytes types such as B cells and Natural Killer (NK) cells by the presence of cell surface proteins known as T cell receptors. The term “activated T cells” as used herein, refers to T cells that have been stimulated to produce an immune response (e.g., clonal expansion of activated T cells) by recognition of an antigenic determinant presented in the context of a Class II major histo-compatibility (MHC) marker. T-cells are activated by the presence of an antigenic determinant, cytokines and/or lymphokines and cluster of differentiation cell surface proteins (e.g., CD3, CD4, CD8, the like and combinations thereof). Cells that express a cluster of differential protein often are said to be “positive” for expression of that protein on the surface of T-cells (e.g., cells positive for CD3 or CD 4 expression are referred to as CD3⁺ or CD4⁺). CD3 and CD4 proteins are cell surface receptors or co-receptors that may be directly and/or indirectly involved in signal transduction in T cells.

[0213] Peripheral blood: The term “peripheral blood” as used herein, refers to cellular components of blood (e.g., red blood cells, white blood cells and platelets), which are obtained or prepared from the circulating pool of blood and not sequestered within the lymphatic system, spleen, liver or bone marrow.

[0214] Umbilical cord blood: Umbilical cord blood is distinct from peripheral blood and blood sequestered within the lymphatic system, spleen, liver or bone marrow. The terms “umbilical cord blood”, “umbilical blood” or “cord blood”, which can be used interchangeably, refers to blood that remains in the placenta and in the attached umbilical cord after child birth. Cord blood often contains stem cells including hematopoietic cells.

[0215] By “cytoplasmic CD40” or “CD40 lacking the CD40 extracellular domain” is meant a CD40 polypeptide that lacks the CD40 extracellular domain. In some examples, the terms also refer to a CD40 polypeptide that lacks both the CD40 extracellular domain and a portion of, or all of, the CD40 transmembrane domain.

[0216] By “obtained or prepared” as, for example, in the case of cells, is meant that the cells or cell culture are isolated, purified, or partially purified from the source, where the source may be, for example, umbilical cord blood, bone marrow, or peripheral blood. The terms may also apply to the case where the original source, or a cell culture, has been cultured and the cells have replicated, and where the progeny cells are now derived from the original source.

[0217] By “kill” or “killing” as in a percent of cells killed, is meant the death of a cell through apoptosis, as measured using any method known for measuring apoptosis, and, for example, using the assays discussed herein, such as, for example the SEAP assays or T cell assays discussed herein. The term may also refer to cell ablation.

[0218] Allodepletion: The term “allodepletion” as used herein, refers to the selective depletion of alloreactive T cells. The term “alloreactive T cells” as used herein, refers to T cells activated to produce an immune response in reaction to exposure to foreign cells, such as, for example, in a transplanted allograft. The selective depletion generally involves targeting various cell surface expressed markers or proteins, (e.g., sometimes cluster of differentiation proteins (CD proteins), CD19, or the like), for removal using immunomagnets, immunotoxins, flow sorting, induction of apoptosis, photodepletion techniques, the like or combinations thereof. In the present methods, the cells may be transduced or transfected with the chimeric protein-encoding vector before or after allodepletion. Also, the cells may be transduced or transfected with the chimeric protein-encoding vector without an allodepletion step, and the non-allodepleted cells may be administered to the patient. Because of the added “safety switch” it is, for example, possible to administer the non-allo-depleted (or only partially allo-depleted) T cells because an adverse event such as, for example, graft versus host disease, may be alleviated upon the administration of the multimeric ligand.

[0219] Graft versus host disease: The terms “graft versus host disease” or “GvHD”, refer to a complication often associated with allogeneic bone marrow transplantation and sometimes associated with transfusions of un-irradiated blood to immunocompromised patients. Graft versus host disease sometimes can occur when functional immune cells in the transplanted marrow recognize the recipient as “foreign” and mount an immunologic response. GvHD can be divided into an acute form and a chronic form. Acute GVHD (aGVHD) often is observed within the first 100 days following transplant or transfusion and can affect the liver, skin, mucosa, immune system (e.g., the hematopoietic system, bone marrow, thymus, and the like), lungs and gastrointestinal tract. Chronic GVHD (cGVHD) often begins 100 days or later post transplant or transfusion and can attack the same organs as acute GvHD, but also can affect connective tissue and exocrine glands. Acute GvHD of the skin can result in a diffuse maculopapular rash, sometimes in a lacy pattern.

[0220] Donor T cell: The term “donor T cell” as used here refers to T cells that often are administered to a recipient to confer anti-viral and/or anti-tumor immunity following allogeneic stem cell transplantation. Donor T cells often are utilized to inhibit marrow graft rejection and increase the success of alloengraftment, however the same donor T cells can cause an alloaggressive response against host antigens, which in turn can result in graft versus host disease (GVHD). Certain activated donor T cells can cause a higher or lower GvHD response than other activated T cells. Donor T cells may also be reactive against recipient tumor cells, causing a beneficial graft vs. tumor effect.

[0221] Mesenchymal stromal cell: The terms “mesenchymal stromal cell” or “bone marrow derived mesenchymal stromal cell” as used herein, refer to multipotent stem cells that can differentiate ex vivo, in vitro and in vivo into adipocytes, osteoblasts and chondroblasts, and may be further defined as a fraction of mononuclear bone marrow cells that adhere to plastic culture dishes in standard culture conditions, are negative for hematopoietic lineage markers and are positive for CD73, CD90 and CD105.

[0222] Embryonic stem cell: The term “embryonic stem cell” as used herein, refers to pluripotent stem cells derived from the inner cell mass of the blastocyst, an early-stage embryo of between 50 to 150 cells. Embryonic stem cells are characterized by their ability to renew themselves indefinitely and by their ability to differentiate into derivatives of all three primary germ layers, ectoderm, endoderm and mesoderm. Pluripotent is distinguished from mutipotent in that pluripotent cells can generate all cell types, while multipotent cells (e.g., adult stem cells) can only produce a limited number of cell types.

[0223] Inducible pluripotent stem cell: The terms “inducible pluripotent stem cell” or “induced pluripotent stem cell” as used herein refers to adult, or differentiated cells, that are “reprogrammed” or induced by genetic (e.g., expression of genes that in turn activates pluripotency), biological (e.g., treatment viruses or retroviruses) and/or chemical (e.g., small molecules, peptides and the like) manipulation to generate cells that are capable of differentiating into many if not all cell types, like embryonic stem cells. Inducible pluripotent stem cells are distinguished from embryonic stem cells in that they achieve an intermediate or terminally differentiated state (e.g., skin cells, bone cells, fibroblasts, and the like) and then are induced to dedifferentiate, thereby regaining some or all of the ability to generate multipotent or pluripotent cells.

[0224] CD34⁺ cell: The term “CD34⁺ cell” as used herein refers to a cell expressing the CD34 protein on its cell surface. “CD34” as used herein refers to a cell surface glycoprotein (e.g., sialomucin protein) that often acts as a cell-cell adhesion factor and is involved in T cell entrance into lymph nodes, and is a member of the “cluster of differentiation” gene family. CD34 also may mediate the attachment of stem cells to bone marrow, extracellular matrix or directly to stromal cells. CD34⁺ cells often are found in the umbilical cord and bone marrow as hematopoietic cells, a subset of mesenchymal stem cells, endothelial progenitor cells, endothelial cells of blood vessels but not lymphatics (except pleural lymphatics), mast cells, a sub-population of dendritic cells (which are factor XIIIa negative) in the interstitium and around the adnexa of dermis of skin, as well as cells in certain soft tissue tumors (e.g., alveolar soft part sarcoma, pre-B acute lymphoblastic leukemia (Pre-B-ALL), acute myelogenous leukemia (AML), AML-M7, dermatofibrosarcoma protuberans, gastrointestinal stromal tumors, giant cell fibroblastoma, granulocytic sarcoma, Kaposi's sarcoma, liposarcoma, malignant fibrous histiocytoma, malignant peripheral nerve sheath tumors, mengingeal hemangiopericytomas, meningiomas, neurofibromas, schwannomas, and papillary thyroid carcinoma).

[0225] Gene expression vector: The terms “gene expression vector”, “nucleic acid expression vector”, or “expression vector” as used herein, which can be used interchangeably throughout the document, generally refers to a nucleic acid molecule (e.g., a plasmid, phage, autonomously replicating sequence (ARS), artificial chromosome, yeast artificial chromosome (e.g., YAC)) that can be replicated in a host cell and be utilized to introduce a gene or genes into a host cell. The genes introduced on the expression vector can be endogenous genes (e.g., a gene normally found in the host cell or organism) or heterologous genes (e.g., genes not normally found in the genome or on extra-chromosomal nucleic acids of the host cell or organism). The genes introduced into a cell by an expression vector can be native genes or genes that have been modified or engineered. The gene expression vector also can be engineered to contain 5′ and 3′ untranslated regulatory sequences that sometimes can function as enhancer sequences, promoter regions and/or terminator sequences that can facilitate or enhance efficient transcription of the gene or genes carried on the expression vector. A gene expression vector sometimes also is engineered for replication and/or expression functionality (e.g., transcription and translation) in a particular cell type, cell location, or tissue type. Expression vectors sometimes include a selectable marker for maintenance of the vector in the host or recipient cell.

[0226] Developmentally regulated promoter: The term “developmentally regulated promoter” as used herein refers to a promoter that acts as the initial binding site for RNA polymerase to transcribe a gene which is expressed under certain conditions that are controlled, initiated by or influenced by a developmental program or pathway. Developmentally regulated promoters often have additional control regions at or near the promoter region for binding activators or repressors of transcription that can influence transcription of a gene that is part of a development program or pathway. Developmentally regulated promoters sometimes are involved in transcribing genes whose gene products influence the developmental differentiation of cells.

[0227] Developmentally differentiated cells: The term “developmentally differentiated cells”, as used herein refers to cells that have undergone a process, often involving expression of specific developmentally regulated genes, by which the cell evolves from a less specialized form to a more specialized form in order to perform a specific function. Non-limiting examples of developmentally differentiated cells are liver cells, lung cells, skin cells, nerve cells, blood cells, and the like. Changes in developmental differentiation generally involve changes in gene expression (e.g., changes in patterns of gene expression), genetic re-organization (e.g., remodeling or chromatin to hide or expose genes that will be silenced or expressed, respectively), and occasionally involve changes in DNA sequences (e.g., immune diversity differentiation). Cellular differentiation during development can be understood as the result of a gene regulatory network. A regulatory gene and its cis-regulatory modules are nodes in a gene regulatory network that receive input (e.g., protein expressed upstream in a development pathway or program) and create output elsewhere in the network (e.g., the expressed gene product acts on other genes downstream in the developmental pathway or program).

[0228] The terms “cell,” “cell line,” and “cell culture” as used herein may be used interchangeably. All of these terms also include their progeny, which are any and all subsequent generations. It is understood that all progeny may not be identical due to deliberate or inadvertent mutations.

[0229] As used here, the term “rapalog” is meant as an analog of the natural antibiotic rapamycin. Certain rapalogs in the present embodiments have properties such as stability in serum, a poor affinity to wildtype FRB (and hence the parent protein, mTOR, leading to reduction or elimination of immunosuppressive properties), and a relatively high affinity to a mutant FRB domain. For commercial purposes, in certain embodiments, the rapalogs have useful scaling and production properties. Examples of rapalogs include, but are not limited to, S-o,p-dimethoxyphenyl (DMOP)-rapamycin: EC₅₀ (wt FRB (K2095 T2098 W2101) ˜1000 nM), EC₅₀ (FRB-KLW˜ 5 nM) Luengo J I (95) Chem & Biol 2:471-81; Luengo J I (94) J. Org Chem 59:6512-6513; U.S. Pat. No. 6,187,757; R-Isopropoxyrapamycin: EC₅₀ (wt FRB (K2095 T2098 W2101) ˜300 nM), EC₅₀ (FRB-PLF˜8.5 nM); Liberles S (97) PNAS 94:7825-30; and S-Butanesulfonamidorap (AP23050): EC₅₀ (wt FRB (K2095 T2098 W2101) ˜2.7 nM), EC₅₀ (FRB-KTF˜>200 nM) Bayle (06) Chem & Bio. 13:99-107.

[0230] The term “FRB” refers to the FKBP12-Rapamycin-Binding (FRB) domain (residues 2015-2114 encoded within mTOR), and analogs thereof. In certain embodiments, FRB analogs or variants are provided. The properties of an FRB analog or variant are stability (some variants are more labile than others) and ability to bind to various rapalogs. In certain embodiments, the FRB analog or variant binds to a C7 rapalog, such as, for example, those provided in the present application, and those referred to in publications that are incorporated by reference herein. In certain embodiments, the FRB analog or variant comprises an amino acid substitution at position T2098. Based on the crystal structure conjugated to rapamcyin, there are 3 key rapamycin-interacting residues that have been most analyzed, K2095, T2098, and W2101. Mutation of all three leads to an unstable protein that can be stabilized in the presence of rapamycin or some rapalogs. This feature can be used to further increase the signal: noise ratio in some applications. Examples of mutants are discussed in Bayle et al (06) Chem & Bio 13:99-107; Stankunas et al (07) Chembiochem 8:1162-1169; and Liberles S (97) PNAS 94:7825-30). Examples of FRB variant polypeptide regions of the present embodiments include, but are not limited to, KLW (with L2098); KTF (with F2101); and KLF (L2098, F2101). FRB variant KLW corresponds to the FRB_{L} polypeptide, for example, consisting of the amino acid of SEQ ID NO: 1085, and has a substitution of an L residue at position 2098. By comparing the KLW variant of SEQ ID NO: 1085 with the wild type FRB polypeptide, for example, the polypeptide consisting of the amino acid sequence of SEQ ID NO: 1066, one can determine the sequence of the other FRB variants listed herein.

[0231] Each ligand can include two or more portions (e.g., defined portions, distinct portions), and sometimes includes two, three, four, five, six, seven, eight, nine, ten, or more portions. The first ligand and second ligand each, independently, can consist of two portions (i.e., dimer), consist of three portions (i.e., trimer) or consist of four portions (i.e., tetramer). The first ligand sometimes includes a first portion and a second portion and the second ligand sometimes includes a third portion and a fourth portion. The first portion and the second portion often are different (i.e., heterogeneous (e.g., heterodimer)), the first portion and the third portion sometimes are different and sometimes are the same, and the third portion and the fourth portion often are the same (i.e., homogeneous (e.g., homodimer)). Portions that are different sometimes have a different function (e.g., bind to the first multimerizing region, bind to the second multimerizing region, do not significantly bind to the first multimerizing region, do not significantly bind to the second multimerizing region (e.g., the first portion binds to the first multimerizing region but does not significantly bind to the second multimerizing region) and sometimes have a different chemical structure. Portions that are different sometimes have a different chemical structure but can bind to the same multimerizing region (e.g., the second portion and the third portion can bind to the second multimerizing region but can have different structures). The first portion sometimes binds to the first multimerizing region and sometimes does not bind significantly to the second multimerizing region. Each portion sometimes is referred to as a “monomer” (e.g., first monomer, second monomer, third monomer and fourth monomer that tracks the first portion, second portion, third portion and fourth portion, respectively). Each portion sometimes is referred to as a “side.” Sides of a ligand may sometimes be adjacent to each other, and may sometimes be located at opposing locations on a ligand.

[0232] By being “capable of binding”, as in the example of a multimeric or heterodimeric ligand binding to a multimerizing region or ligand binding region is meant that the ligand binds to the ligand binding region, for example, a portion, or portions, of the ligand bind to the multimerizing region, and that this binding may be detected by an assay method including, but not limited to, a biological assay, a chemical assay, or physical means of detection such as, for example, x-ray crystallography. In addition, where a ligand is considered to “not significantly bind” is meant that there may be minor detection of binding of a ligand to the ligand binding region, but that this amount of binding, or the stability of binding is not significantly detectable, and, when occurring in the cells of the present embodiment, does not activate the modified cell or cause apoptosis. In certain examples, where the ligand does not “significantly bind,” upon administration of the ligand, the amount of cells undergoing apoptosis is less than 10, 5, 4, 3, 2, or 1%.

[0233] By “region” or “domain” is meant a polypeptide, or fragment thereof, that maintains the function of the polypeptide as it relates to the chimeric polypeptides of the present application. That is, for example, an FKBP12 binding domain, FKBP12 domain, FKBP12 region, FKBP12 multimerizing region, and the like, refer to an FKBP12 polypeptide that binds to the CID ligand, such as, for example, rimiducid, or rapamycin, to cause, or allow for, dimerization or multimerization of the chimeric polypeptide. By “region” or “domain” of a pro-apoptotic polypeptide, for example, the Caspase-9 polypeptides or truncated Caspase-9 polypeptides of the present applications, is meant that upon dimerization or multimerization of the Caspase-9 region as part of the chimeric polypeptide, or chimeric pro-apoptotic polypeptide, the dimerized or multimerized chimeric polypeptide can participate in the caspase cascade, allowing for, or causing, apoptosis.

[0234] As used herein, the term “iCaspase-9” molecule, polypeptide, or protein is defined as an inducible Caspase-9. The term “iCaspase-9” embraces iCaspase-9 nucleic acids, iCaspase-9 polypeptides and/or iCaspase-9 expression vectors. The term also encompasses either the natural iCaspase-9 nucleotide or amino acid sequence, or a truncated sequence that is lacking the CARD domain.

[0235] As used herein, the term “iCaspase 1 molecule”, “iCaspase 3 molecule”, or “iCaspase 8 molecule” is defined as an inducible Caspase 1, 3, or 8, respectively. The term iCaspase 1, iCaspase 3, or iCaspase 8, embraces iCaspase 1, 3, or 8 nucleic acids, iCaspase 1, 3, or 8 polypeptides and/or iCaspase 1, 3, or 8 expression vectors, respectively. The term also encompasses either the natural CaspaseiCaspase-1, -3, or -8 nucleotide or amino acid sequence, respectively, or a truncated sequence that is lacking the CARD domain. By “wild type” Caspase-9 in the context of the experimental details provided herein, is meant the Caspase-9 molecule lacking the CARD domain.

[0236] Modified Caspase-9 polypeptides comprise at least one amino acid substitution that affects basal activity or IC₅₀, in a chimeric polypeptide comprising the modified Caspase-9 polypeptide. Methods for testing basal activity and IC₅₀ are discussed herein. Non-modified Caspase-9 polypeptides do not comprise this type of amino acid substitution. Both modified and non-modified Caspase-9 polypeptides may be truncated, for example, to remove the CARD domain.

[0237] “Function-conservative variants” are proteins or enzymes in which a given amino acid residue has been changed without altering overall conformation and function of the protein or enzyme, including, but not limited to, replacement of an amino acid with one having similar properties, including polar or non-polar character, size, shape and charge. Conservative amino acid substitutions for many of the commonly known non-genetically encoded amino acids are well known in the art. Conservative substitutions for other non-encoded amino acids can be determined based on their physical properties as compared to the properties of the genetically encoded amino acids.

[0238] Amino acids other than those indicated as conserved may differ in a protein or enzyme so that the percent protein or amino acid sequence similarity between any two proteins of similar function may vary and can be, for example, at least 70%, at least 80%, at least 90%, and at least 95%, as determined according to an alignment scheme. As referred to herein, “sequence similarity” means the extent to which nucleotide or protein sequences are related. The extent of similarity between two sequences can be based on percent sequence identity and/or conservation. “Sequence identity” herein means the extent to which two nucleotide or amino acid sequences are invariant. “Sequence alignment” means the process of lining up two or more sequences to achieve maximal levels of identity (and, in the case of amino acid sequences, conservation) for the purpose of assessing the degree of similarity. Numerous methods for aligning sequences and assessing similarity/identity are known in the art such as, for example, the Cluster Method, wherein similarity is based on the MEGALIGN algorithm, as well as BLASTN, BLASTP, and FASTA. When using any of these programs, the settings may be selected that result in the highest sequence similarity.

[0239] The amino acid residue numbers referred to herein reflect the amino acid position in the non-truncated and non-modified Caspase-9 polypeptide, for example, that of SEQ ID NO: 9. SEQ ID NO: 9 provides an amino acid sequence for the truncated Caspase-9 polypeptide, which does not include the CARD domain. Thus SEQ ID NO: 9 commences at amino acid residue number 135, and ends at amino acid residue number 416, with reference to the full length Caspase-9 amino acid sequence. Those of ordinary skill in the art may align the sequence with other sequences of Caspase-9 polypeptides to, if desired, correlate the amino acid residue number, for example, using the sequence alignment methods discussed herein.

[0240] As used herein, the term “cDNA” is intended to refer to DNA prepared using messenger RNA (mRNA) as template. The advantage of using a cDNA, as opposed to genomic DNA or DNA polymerized from a genomic, non- or partially-processed RNA template, is that the cDNA primarily contains coding sequences of the corresponding protein. There are times when the full or partial genomic sequence is used, such as where the non-coding regions are required for optimal expression or where non-coding regions such as introns are to be targeted in an antisense strategy.

[0241] As used herein, the term “expression construct” or “transgene” is defined as any type of genetic construct containing a nucleic acid coding for gene products in which part or all of the nucleic acid encoding sequence is capable of being transcribed can be inserted into the vector. The transcript is translated into a protein, but it need not be. In certain embodiments, expression includes both transcription of a gene and translation of mRNA into a gene product. In other embodiments, expression only includes transcription of the nucleic acid encoding genes of interest. The term “therapeutic construct” may also be used to refer to the expression construct or transgene. The expression construct or transgene may be used, for example, as a therapy to treat hyperproliferative diseases or disorders, such as cancer, thus the expression construct or transgene is a therapeutic construct or a prophylactic construct.

[0242] As used herein, the term “expression vector” refers to a vector containing a nucleic acid sequence coding for at least part of a gene product capable of being transcribed. In some cases, RNA molecules are then translated into a protein, polypeptide, or peptide. In other cases, these sequences are not translated, for example, in the production of antisense molecules or ribozymes. Expression vectors can contain a variety of control sequences, which refer to nucleic acid sequences necessary for the transcription and possibly translation of an operatively linked coding sequence in a particular host organism. In addition to control sequences that govern transcription and translation, vectors and expression vectors may contain nucleic acid sequences that serve other functions as well and are discussed infra.

[0243] As used herein, the term “ex vivo” refers to “outside” the body. The terms “ex vivo” and “in vitro” can be used interchangeably herein.

[0244] As used herein, the term “functionally equivalent,” as it relates to Caspase-9, or truncated Caspase-9, for example, refers to a Caspase-9 nucleic acid fragment, variant, or analog, refers to a nucleic acid that codes for a Caspase-9 polypeptide, or a Caspase-9 polypeptide, that stimulates an apoptotic response. “Functionally equivalent” refers, for example, to a Caspase-9 polypeptide that is lacking the CARD domain, but is capable of inducing an apoptotic cell response. When the term “functionally equivalent” is applied to other nucleic acids or polypeptides, such as, for example, CD19, the 5′LTR, the multimeric ligand binding region, or CD3, it refers to fragments, variants, and the like that have the same or similar activity as the reference polypeptides of the methods herein.

[0245] As used herein, the term “gene” is defined as a functional protein, polypeptide, or peptide-encoding unit. As will be understood, this functional term includes genomic sequences, cDNA sequences, and smaller engineered gene segments that express, or are adapted to express, proteins, polypeptides, domains, peptides, fusion proteins, and mutants.

[0246] The term “hyperproliferative disease” is defined as a disease that results from a hyperproliferation of cells. Exemplary hyperproliferative diseases include, but are not limited to cancer or autoimmune diseases. Other hyperproliferative diseases may include vascular occlusion, restenosis, atherosclerosis, or inflammatory bowel disease.

[0247] The term “immunogenic composition” or “immunogen” refers to a substance that is capable of provoking an immune response. Examples of immunogens include, e.g., antigens, autoantigens that play a role in induction of autoimmune diseases, and tumor-associated antigens expressed on cancer cells.

[0248] The term “immunocompromised” as used herein is defined as a subject that has reduced or weakened immune system. The immunocompromised condition may be due to a defect or dysfunction of the immune system or to other factors that heighten susceptibility to infection and/or disease. Although such a categorization allows a conceptual basis for evaluation, immunocompromised individuals often do not fit completely into one group or the other. More than one defect in the body's defense mechanisms may be affected. For example, individuals with a specific T-lymphocyte defect caused by HIV may also have neutropenia caused by drugs used for antiviral therapy or be immunocompromised because of a breach of the integrity of the skin and mucous membranes. An immunocompromised state can result from indwelling central lines or other types of impairment due to intravenous drug abuse; or be caused by secondary malignancy, malnutrition, or having been infected with other infectious agents such as tuberculosis or sexually transmitted diseases, e.g., syphilis or hepatitis.

[0249] As used herein, the term “pharmaceutically or pharmacologically acceptable” refers to molecular entities and compositions that do not produce adverse, allergic, or other untoward reactions when administered to an animal or a human.

[0250] As used herein, “pharmaceutically acceptable carrier” includes any and all solvents, dispersion media, coatings, antibacterial and antifungal agents, isotonic and absorption delaying agents and the like. The use of such media and agents for pharmaceutically active substances is well known in the art. Except insofar as any conventional media or agent is incompatible with the vectors or cells presented herein, its use in therapeutic compositions is contemplated. Supplementary active ingredients also can be incorporated into the compositions.

[0251] As used herein, the term “polynucleotide” is defined as a chain of nucleotides. Furthermore, nucleic acids are polymers of nucleotides. Thus, nucleic acids and polynucleotides as used herein are interchangeable. Nucleic acids are polynucleotides, which can be hydrolyzed into the monomeric “nucleotides.” The monomeric nucleotides can be hydrolyzed into nucleosides. As used herein polynucleotides include, but are not limited to, all nucleic acid sequences which are obtained by any means available in the art, including, without limitation, recombinant means, i.e., the cloning of nucleic acid sequences from a recombinant library or a cell genome, using ordinary cloning technology and PCR™, and the like, and by synthetic means. Furthermore, polynucleotides include mutations of the polynucleotides, include but are not limited to, mutation of the nucleotides, or nucleosides by methods well known in the art. A nucleic acid may comprise one or more polynucleotides.

[0252] As used herein, the term “polypeptide” is defined as a chain of amino acid residues, usually having a defined sequence. As used herein the term polypeptide is interchangeable with the terms “peptides” and “proteins”.

[0253] As used herein, the term “promoter” is defined as a DNA sequence recognized by the synthetic machinery of the cell, or introduced synthetic machinery, required to initiate the specific transcription of a gene.

[0254] The term “transfection” and “transduction” are interchangeable and refer to the process by which an exogenous DNA sequence is introduced into a eukaryotic host cell. Transfection (or transduction) can be achieved by any one of a number of means including electroporation, microinjection, gene gun delivery, retroviral infection, lipofection, superfection and the like.

[0255] As used herein, the term “syngeneic” refers to cells, tissues or animals that have genotypes that are identical or closely related enough to allow tissue transplant, or are immunologically compatible. For example, identical twins or animals of the same inbred strain. Syngeneic and isogeneic can be used interchangeably.

[0256] The terms “patient” or “subject” are interchangeable, and, as used herein include, but are not limited to, an organism or animal; a mammal, including, e.g., a human, non-human primate (e.g., monkey), mouse, pig, cow, goat, rabbit, rat, guinea pig, hamster, horse, monkey, sheep, or other non-human mammal; a non-mammal, including, e.g., a non-mammalian vertebrate, such as a bird (e.g., a chicken or duck) or a fish, and a non-mammalian invertebrate.

[0257] By “T cell activation molecule” is meant a polypeptide that, when incorporated into a T cell expressing a chimeric antigen receptor, enhances activation of the T cell. Examples include, but are not limited to, ITAM-containing, Signal 1 conferring molecules such as, for example, CD3 ζ polypeptide, and Fc receptor gamma, such as, for example, Fc epsilon receptor gamma (FcεR1γ) subunit (Haynes, N. M., et al. J. Immunol. 166:182-7 (2001)) J. Immunology).

[0258] As used herein, the term “under transcriptional control” or “operatively linked” is defined as the promoter is in the correct location and orientation in relation to the nucleic acid to control RNA polymerase initiation and expression of the gene.

[0259] As used herein, the terms “treatment”, “treat”, “treated”, or “treating” refer to prophylaxis and/or therapy.

[0260] As used herein, the term “vaccine” refers to a formulation that contains a composition presented herein which is in a form that is capable of being administered to an animal. Typically, the vaccine comprises a conventional saline or buffered aqueous solution medium in which the composition is suspended or dissolved. In this form, the composition can be used conveniently to prevent, ameliorate, or otherwise treat a condition. Upon introduction into a subject, the vaccine is able to provoke an immune response including, but not limited to, the production of antibodies, cytokines and/or other cellular responses.

[0261] In some embodiments, the nucleic acid is contained within a viral vector. In certain embodiments, the viral vector is a retroviral vector. In certain embodiments, the viral vector is an adenoviral vector or a lentiviral vector. It is understood that in some embodiments, the antigen-presenting cell is contacted with the viral vector ex vivo, and in some embodiments, the antigen-presenting cell is contacted with the viral vector in vivo.

### Hematopoietic Stem Cells and Cell Therapy

[0262] Hematopoietic stem cells include hematopoietic progenitor cells, immature, multipotent cells that can differentiate into mature blood cell types. These stem cells and progenitor cells may be isolated from bone marrow and umbilical cord blood, and, in some cases, from peripheral blood. Other stem and progenitor cells include, for example, mesenchymal stromal cells, embryonic stem cells, and inducible pluripotent stem cells.

[0263] Bone marrow derived mesenchymal stromal cells (MSCs) have been defined as a fraction of mononuclear bone marrow cells that adhere to plastic culture dishes in standard culture conditions, are negative for hematopoietic lineage markers and positive for CD73, CD90 and CD105, and able to differentiate in vitro into adipocytes, osteoblasts, and chondroblasts. While one physiologic role is presumed to be the support of hematopoiesis, several reports have also established that MSCs are able to incorporate and possibly proliferate in areas of active growth, such as cicatricial and neoplastic tissues, and to home to their native microenvironment and replace the function of diseased cells. Their differentiation potential and homing ability make MSCs attractive vehicles for cellular therapy, either in their native form for regenerative applications, or through their genetic modification for delivery of active biological agents to specific microenvironments such as diseased bone marrow or metastatic deposits. In addition, MSCs possess potent intrinsic immunosuppressive activity, and to date have found their most frequent application in the experimental treatment of graft-versus-host disease and autoimmune disorders (Pittenger, M. F., et al. (1999). Science 284:143-147; Dominici, M., et al. (2006). Cytotherapy 8:315-317; Prockop, D. J. (1997). Science 276:71-74; Lee, R. H., et al. (2006). Proc Natl Acad Sci USA 103:17438-17443; Studeny, M., et al., (2002). Cancer Res 62:3603-3608; Studeny, M., et al. (2004). J Natl Cancer Inst 96:1593-1603; Horwitz, E. M., et al. (1999). Nat Med 5:309-313; Chamberlain, G., et al., (2007). Stem Cells 25:2739-2749; Phinney, D. G., and Prockop, D. J. (2007). Stem Cells 25:2896-2902; Horwitz, E. M., et al. (2002). Proc Natl Acad Sci USA 99:8932-8937; Hall, B., et al., (2007). Int J Hematol 86:8-16; Nauta, A. J., and Fibbe, W. E. (2007). Blood 110:3499-3506; Le Blanc, K., et al. (2008). Lancet 371:1579-1586; Tyndall, A., and Uccelli, A. (2009). Bone Marrow Transplant).

[0264] MSCs have been infused in hundreds of patients with minimal reported side effects. However, follow-up is limited, long term side effects are unknown, and little is known of the consequences that will be associated with future efforts to induce their in vivo differentiation, for example to cartilage or bone, or to genetically modify them to enhance their functionality. Several animal models have raised safety concerns. For instance, spontaneous osteosarcoma formation in culture has been observed in murine derived MSCs. Furthermore, ectopic ossification and calcification foci have been discussed in mouse and rat models of myocardial infarction after local injection of MSC, and their proarrhythmic potential has also been apparent in co-culture experiments with neonatal rat ventricular myocytes. Moreover, bilateral diffuse pulmonary ossification has been observed after bone marrow transplant in a dog, presumably due to the transplanted stromal components (Horwitz, E. M., et al., (2007). Biol Blood Marrow Transplant 13:53-57; Tolar, J., et al. (2007). Stem Cells 25:371-379; Yoon, Y.-S., et al., (2004). Circulation 109:3154-3157; Breitbach, M., et al. (2007). Blood 110:1362-1369; Chang, M. G., et al. (2006). Circulation 113:1832-1841; Sale, G. E., and Storb, R. (1983). Exp Hematol 11:961-966).

[0265] In another example of cell therapy, T cells transduced with a nucleic acid encoding a chimeric antigen receptor have been administered to patients to treat cancer (Zhong, X.-S., (2010) Molecular Therapy 18:413-420). Chimeric antigen receptors (CARs) are artificial receptors designed to convey antigen specificity to T cells without the requirement for MHC antigen presentation. They include an antigen-specific component, a transmembrane component, and an intracellular component selected to activate the T cell and provide specific immunity. Chimeric antigen receptor-expressing T cells may be used in various therapies, including cancer therapies. Costimulating polypeptides may be used to enhance the activation of CAR-expressing T cells against target antigens, and therefore increase the potency of adoptive immunotherapy.

[0266] For example, T cells expressing a chimeric antigen receptor based on the humanized monoclonal antibody Trastuzumab (Herceptin) has been used to treat cancer patients. Adverse events are possible, however, and in at least one reported case, the therapy had fatal consequences to the patient (Morgan, R. A., et al., (2010) Molecular Therapy 18:843-851). Transducing the cells with a chimeric Caspase-9-based safety switch as presented herein, would provide a safety switch that could stop the adverse event from progressing. Therefore, in some embodiments are provided nucleic acids, cells, and methods wherein the modified T cell also expresses an inducible Caspase-9 polypeptide. If there is a need, for example, to reduce the number of chimeric antigen receptor modified T cells, an inducible ligand may be administered to the patient, thereby inducing apoptosis of the modified T cells.

[0267] The antitumor efficacy from immunotherapy with T cells engineered to express chimeric antigen receptors (CARs) has steadily improved as CAR molecules have incorporated additional signaling domains to increase their potency. T cells transduced with first generation CARs, containing only the CD3ζ intracellular signaling molecule, have demonstrated poor persistence and expansion in vivo following adoptive transfer (Till B G, Jensen M C, Wang J, et al: CD20-specific adoptive immunotherapy for lymphoma using a chimeric antigen receptor with both CD28 and 4-1BB domains: pilot clinical trial results. Blood 119:3940-50, 2012; Pule M A, Savoldo B, Myers G D, et al: Virus-specific T cells engineered to coexpress tumor-specific receptors: persistence and antitumor activity in individuals with neuroblastoma. Nat Med 14:1264-70, 2008; Kershaw M H, Westwood J A, Parker L L, et al: A phase 1 study on adoptive immunotherapy using gene-modified T cells for ovarian cancer. Clin Cancer Res 12:6106-15, 2006), as tumor cells often lack the requisite costimulating molecules necessary for complete T cell activation. Second generation CAR T cells were designed to improve proliferation and survival of the cells. Second generation CAR T cells that incorporate the intracellular costimulating domains from either CD28 or 4-1BB (Carpenito C, Milone M C, Hassan R, et al: Control of large, established tumor xenografts with genetically retargeted human T cells containing CD28 and CD137 domains. Proc Natl Acad Sci USA 106:3360-5, 2009; Song D G, Ye Q, Poussin M, et al: CD27 costimulation augments the survival and antitumor activity of redirected human T cells in vivo. Blood 119:696-706, 2012), show improved survival and in vivo expansion following adoptive transfer, and more recent clinical trials using anti-CD19 CAR-modified T cells containing these costimulating molecules have shown remarkable efficacy for the treatment of CD19⁺ leukemia. (Kalos M, Levine B L, Porter D L, et al: T cells with chimeric antigen receptors have potent antitumor effects and can establish memory in patients with advanced leukemia. Sci Transl Med 3:95ra73, 2011; Porter D L, Levine B L, Kalos M, et al: Chimeric antigen receptor-modified T cells in chronic lymphoid leukemia. N Engl J Med 365:725-33, 2011; Brentjens R J, Davila M L, Riviere I, et al: CD19-targeted T cells rapidly induce molecular remissions in adults with chemotherapy-refractory acute lymphoblastic leukemia. Sci Transl Med 5: 177ra38, 2013).

[0268] While others have explored additional signaling molecules from tumor necrosis factor (TNF)-family proteins, such as OX40 and 4-1BB, called “third generation” CAR T cells, (Finney H M, Akbar A N, Lawson A D: Activation of resting human primary T cells with chimeric receptors: costimulation from CD28, inducible costimulator, CD134, and CD137 in series with signals from the TCR zeta chain. J Immunol 172:104-13, 2004; Guedan S, Chen X, Madar A, et al: ICOS-based chimeric antigen receptors program bipolar TH17/TH1 cells. Blood, 2014), other molecules which induce T cell signaling distinct from the CD3ζ nuclear factor of activated T cells (NFAT) pathway may provide necessary costimulation for T cell survival and proliferation, and possibly endow CAR T cells with additional, valuable functions, not supplied by more conventional costimulating molecules. Some second and third-generation CAR T cells have been implicated in patient deaths, due to cytokine storm and tumor lysis syndrome caused by highly activated T cells.

[0269] By “chimeric antigen receptor” or “CAR” is meant, for example, a chimeric polypeptide which comprises a polypeptide sequence that recognizes a target antigen (an antigen-recognition domain) linked to a transmembrane polypeptide and intracellular domain polypeptide selected to activate the T cell and provide specific immunity. The antigen-recognition domain may be a single-chain variable fragment (scFv), or may, for example, be derived from other molecules such as, for example, a T cell receptor or Pattern Recognition Receptor. The intracellular domain comprises at least one polypeptide which causes activation of the T cell, such as, for example, but not limited to, CD3 zeta, and, for example, co-stimulatory molecules, for example, but not limited to, CD28, OX40 and 4-1BB. The term “chimeric antigen receptor” may also refer to chimeric receptors that are not derived from antibodies, but are chimeric T cell receptors. These chimeric T cell receptors may comprise a polypeptide sequence that recognizes a target antigen, where the recognition sequence may be, for example, but not limited to, the recognition sequence derived from a T cell receptor or an scFv. The intracellular domain polypeptides are those that act to activate the T cell. Chimeric T cell receptors are discussed in, for example, Gross, G., and Eshar, Z., FASEB Journal 6:3370-3378 (1992), and Zhang, Y., et al., PLOS Pathogens 6:1-13 (2010).

[0270] In one type of chimeric antigen receptor (CAR), the variable heavy (VH) and light (VL) chains for a tumor-specific monoclonal antibody are fused in-frame with the CD3 zeta chain (ζ) from the T cell receptor complex. The VH and VL are generally connected together using a flexible glycine-serine linker, and then attached to the transmembrane domain by a spacer (CH2CH3) to extend the scFv away from the cell surface so that it can interact with tumor antigens. Following transduction, T cells now express the CAR on their surface, and upon contact and ligation with a tumor antigen, signal through the CD3 zeta chain inducing cytotoxicity and cellular activation.

[0271] Investigators have noted that activation of T cells through CD3 zeta is sufficient to induce a tumor-specific killing, but is insufficient to induce T cell proliferation and survival. Early clinical trials using T cells modified with first generation CARs expressing only the zeta chain showed that gene-modified T cells exhibited poor survival and proliferation in vivo.

[0272] As co-stimulation through the B7 axis is necessary for complete T cell activation, investigators added the co-stimulating polypeptide CD28 signaling domain to the CAR construct. This region generally contains the transmembrane region (in place of the CD3 zeta version) and the YMNM motif for binding PI3K and Lck. In vivo comparisons between T cells expressing CARs with only zeta or CARs with both zeta and CD28 demonstrated that CD28 enhanced expansion in vivo, in part due to increased IL-2 production following activation. The inclusion of CD28 is called a 2nd generation CAR. The most commonly used costimulating molecules include CD28 and 4-1BB, which, following tumor recognition, can initiate a signaling cascade resulting in NF-κB activation, which promotes both T cell proliferation and cell survival.

[0273] The use of co-stimulating polypeptides 4-1BB or OX40 in CAR design has further improved T cell survival and efficacy. 4-1BB in particular appears to greatly enhance T cell proliferation and survival. This 3rd generation design (with 3 signaling domains) has been used in PSMA CARs (Zhong X S, et al., Mol Ther. 2010 February; 18 (2): 413-20) and in CD19 CARs, most notably for the treatment of CLL (Milone, M. C., et al., (2009) Mol. Ther. 17:1453-1464; Kalos, M., et al., Sci. Transl. Med. (2011) 3:95ra73; Porter, D., et al., (2011) N. Engl. J. Med. 365:725-533). These cells showed impressive function in 3 patients, expanding more than a 1000-fold in vivo, and resulted in sustained remission in all three patients.

[0274] It is understood that by “derived” is meant that the nucleotide sequence or amino acid sequence may be derived from the sequence of the molecule. The intracellular domain comprises at least one polypeptide which causes activation of the T cell, such as, for example, but not limited to, CD3 zeta, and, for example, co-stimulatory molecules, for example, but not limited to, CD28, OX40 and 4-1BB.

[0275] T cell receptors are molecules composed of two different polypeptides that are on the surface of T cells. They recognize antigens bound to major histocompatibility complex molecules; upon recognition with the antigen, the T cell is activated. By “recognize” is meant, for example, that the T cell receptor, or fragment or fragments thereof, such as TCRα polypeptide and TCRβ together, is capable of contacting the antigen and identifying it as a target. TCRs may comprise α and β polypeptides, or chains. The α and β polypeptides include two extracellular domains, the variable and the constant domains. The variable domain of the α and β polypeptides has three complementarity determining regions (CDRs); CDR3 is considered to be the main CDR responsible for recognizing the epitope. The α polypeptide includes the V and J regions, generated by VJ recombination, and the β polypeptide includes the V, D, and J regions, generated by VDJ recombination. The intersection of the VJ regions and VDJ regions corresponds to the CDR3 region. TCRs are often named using the International Immunogenetics (IMGT) TCR nomenclature (IMGT Database, www.IMGT.org; Giudicelli, V., et al., IMGT/LIGM-DB, the IMGT® comprehensive database of immunoglobulin and T cell receptor nucleotide sequences, Nucl. Acids Res., 34, D781-D784 (2006). PMID: 16381979; T cell Receptor Factsbook, LeFranc and LeFranc, Academic Press ISBN 0-12-441352-8).

[0276] Chimeric T cell receptors may bind to, for example, antigenic polypeptides such as Bob-1, PRAME, and NY-ESO-1. (U.S. patent application Ser. No. 14/930,572, filed Nov. 2, 2015, titled “T Cell Receptors Directed Against Bob1 and Uses Thereof,” and U.S. Provisional Patent Application No. 62/130,884, filed Mar. 10, 2015, titled “T Cell Receptors Directed Against the Preferentially-Expressed Antigen of Melanoma and Uses Thereof, each of which incorporated by reference in its entirety herein).

[0277] In another example of cell therapy, T cells are modified so that they express a non-functional TGF-beta receptor, rendering them resistant to TGF-beta. This allows the modified T cells to avoid the cytotoxicity caused by TGF-beta, and allows the cells to be used in cellular therapy (Bollard, C. J., et al., (2002) Blood 99:3179-3187; Bollard, C. M., et al., (2004) J. Exptl. Med. 200:1623-1633). However, it also could result in a T cell lymphoma, or other adverse effect, as the modified T cells now lack part of the normal cellular control; these therapeutic T cells could themselves become malignant. Transducing these modified T cells with a chimeric Caspase-9-based safety switch as presented herein, would provide a safety switch that could avoid this result.

[0278] In other examples, Natural Killer cells are modified to express the membrane-targeting polypeptide. Instead of a chimeric antigen receptor, in certain embodiments, the heterologous membrane bound polypeptide is a NKG2D receptor. NKG2D receptors can bind to stress proteins (e.g. MICA/B) on tumor cells and can thereby activate NK cells. The extracellular binding domain can also be fused to signaling domains (Barber, A., et al., Cancer Res 2007; 67:5003-8; Barber A, et al., Exp Hematol. 2008; 36:1318-28; Zhang T., et al., Cancer Res. 2007; 67:11029-36, and this could, in turn, be linked to FRB domains, analogous to FRB-linkered CARs. Moreover, other cell surface receptors, such as VEGF-R could be used as a docking site for FRB domains to enhance tumor-dependent clustering in the presence of hypoxia-triggered VEGF, found at high levels within many tumors.

[0279] Cells used in cellular therapy, that express a heterologous gene, such as a modified receptor, or a chimeric receptor, may be transduced with nucleic acid that encodes a chimeric Caspase-9-based safety switch before, after, or at the same time, as the cells are transduced with the heterologous gene.

### Haploidentical Stem Cell Transplantation

[0280] While stem cell transplantation has proven an effective means of treating a wide variety of diseases involving hematopoietic stem cells and their progeny, a shortage of histocompatible donors has proved a major impediment to the widest application of the approach. The introduction of large panels of unrelated stem cell donors and or cord blood banks has helped to alleviate the problem, but many patients remain unsuited to either source. Even when a matched donor can be found, the elapsed time between commencing the search and collecting the stem cells usually exceeds three months, a delay that may doom many of the neediest patients. Hence there has been considerable interest in making use of HLA haploidentical family donors. Such donors may be parents, siblings or second-degree relatives. The problem of graft rejection may be overcome by a combination of appropriate conditioning and large doses of stem cells, while graft versus host disease (GvHD) may be prevented by extensive T cell-depletion of the donor graft. The immediate outcomes of such procedures have been gratifying, with engraftment rate >90% and a severe GvHD rate of <10% for both adults and children even in the absence of post transplant immunosuppression. Unfortunately, the profound immunosuppression of the grafting procedure, coupled with the extensive T cell-depletion and HLA mismatching between donor and recipient lead to an extremely high rate of post-transplant infectious complications, and contributed to high incidence of disease relapse.

[0281] Donor T cell infusion is an effective strategy for conferring anti-viral and anti-tumor immunity following allogeneic stem cell transplantation. Simple addback of T cells to the patients after haploidentical transplantation, however, cannot work; the frequency of alloreactive T cells is several orders of magnitude higher than the frequency of, for example, virus specific T lymphocytes. Methods are being developed to accelerate immune reconstitution by administrating donor T cells that have first been depleted of alloreactive ceils. One method of achieving this is stimulating donor T cells with recipient EBV-transformed B lymphoblastoid cell lines (LCLs). Alloreactive T cells upregulate CD25 expression, and are eliminated by a CD25 Mab immunotoxin conjugate, RFT5-SMPT-dgA. This compound consists of a murine IgG1 anti-CD25 (IL-2 receptor alpha chain) conjugated via a hetero-bifunctional crosslinker [N-succinimidyloxycarbonyl-alpha-methyl-d-(2-pyridylthio) toluene] to chemically deglycosylated ricin A chain (dgA).

[0282] Treatment with CD25 immunotoxin after LCL stimulation depletes >90% of alloreactive cells. In a phase 1 clinical study, using CD25 immunotoxin to deplete alloreactive lymphocytes immune reconstitution after allodepleted donor T cells were infused at 2 dose levels into recipients of T-cell-depleted haploidentical SCT. Eight patients were treated at 10⁴ cells/kg/dose, and 8 patients received 10⁵ cells/kg/dose. Patients receiving 10⁵ cells/kg/dose showed significantly improved T-cell recovery at 3, 4, and 5 months after SCT compared with those receiving 10⁴ cells/kg/dose (P<0.05). Accelerated T-cell recovery occurred as a result of expansion of the effector memory (CD45RA(−)CCR-7(−)) population (P<0.05), suggesting that protective T-cell responses are likely to be long lived. T-cell-receptor signal joint excision circles (TRECs) were not detected in reconstituting T cells in dose-level 2 patients, indicating they are likely to be derived from the infused allodepleted cells. Spectratyping of the T cells at 4 months demonstrated a polyclonal Vbeta repertoire. Using tetramer and enzyme-linked immunospot (ELISpot) assays, cytomegalovirus (CMV)- and Epstein-Barr virus (EBV)-specific responses in 4 of 6 evaluable patients at dose level 2 as early as 2 to 4 months after transplantation, whereas such responses were not observed until 6 to 12 months in dose-level 1 patients. The incidence of significant acute (2 of 16) and chronic graft-versus-host disease (GvHD; 2 of 15) was low. These data demonstrate that allodepleted donor T cells can be safely used to improve T-cell recovery after haploidentical SCT. The amount of cells infused was subsequently escalated to 10⁶ cells/kg without evidence of GvHD.

[0283] Although this approach reconstituted antiviral immunity, relapse remained a major problem and 6 patients transplanted for high risk leukemia relapsed and died of disease. Higher T cell doses are therefore useful to reconstitute anti-tumor immunity and to provide the hoped-for anti-tumor effect, since the estimated frequency of tumor-reactive precursors is 1 to 2 logs less than frequency of viral-reactive precursors. However, in some patients, these doses of cells will be sufficient to trigger GvHD even after allodepletion (Hurley C K, et al., Biol Blood Marrow Transplant 2003; 9:610-615; Dey B R, et al., Br. J Haematol. 2006; 135:423-437; Aversa F, et al., N Engl J Med 1998; 339:1186-1193; Aversa F, et al., J C lin. On col. 2005; 23:3447-3454; Lang P, Mol. Dis. 2004; 33:281-287; Kolb H J, et al., Blood 2004; 103:767-776; Gottschalk S, et al., Annu. Rev. Med 2005; 56:29-44; Bleakley M, et al., Nat.Rev.Cancer 2004; 4:371-380; Andre-Schmutz I, et al., Lancet 2002; 360:130-137; Solomon S R, et al., Blood 2005; 106:1123-1129; Amrolia P J, et al., Blood 2006; 108:1797-1808; Amrolia P J, et al., Blood 2003; Ghetie V, et al., J Immunol Methods 1991; 142:223-230; Molldrem J J, et al., Cancer Res 1999; 59:2675-2681; Rezvani K, et al., Clin.Cancer Res. 2005; 1 1:8799-8807; Rezvani K, et al., Blood 2003; 102:2892-2900).

### Graft Versus Host Disease (GvHD)

[0284] Graft versus Host Disease is a condition that sometimes occurs after the transplantation of donor immunocompetent cells, for example, T cells, into a recipient. The transplanted cells recognize the recipient's cells as foreign, and attack and destroy them. This condition can be a dangerous effect of T cell transplantation, especially when associated with haploidentical stem cell transplantation. Sufficient T cells should be infused to provide the beneficial effects, such as, for example, the reconstitution of an immune system and the graft anti-tumor effect. But, the number of T cells that can be transplanted can be limited by the concern that the transplant will result in severe graft versus host disease.

[0285] Graft versus Host Disease may be staged as indicated in the following tables:

| | Stage 0 | | Stage 1 | | Stage 2 | | Stage 3 | | Stage 4 |
|---|---|---|---|---|---|---|---|---|---|
| Skin | No rash | | Rash <25% | | 25-50% | | >50% | | Plus bullae and |
| | | | BSA | | | | Generalized | | desquamation |
| | | | | | | | erythroderma | | |
| Gut | <500 | mL | 501-1000 | mL/day | 1001-1500 | mL/day | >1500 | mL/day | Severe |

| (for | diarrhea/ | | | | | >15 | cc/kg/day | abdominal pain |
|---|---|---|---|---|---|---|---|---|
| pediatric | day | 5 | cc/kg- | 10 | cc/kg- | | | and ileus |
| patients) | | 10 | cc/kg/day | 15 | cc/kg/day | | | |
| UGI | | Severe nausea/ | | | | | | |
| | | vomiting | | | | | | |
| Liver | Bilirubins | 2.1-3 | mg/di | 3.1-6 | mg/di | 6.1-15 | mg/di | >15 mg/di |

| | |
|---|---|
| 2 | mg/di |

[0286] Acute GvHD grading may be performed by the consensus conference criteria (Przepiorka D et al., 1994 Consensus Conference on Acute GVHD Grading. Bone Marrow Transplant 1995; 15:825-828).

| | Skin | Liver | Gut | Upper GI |
|---|---|---|---|---|
| 0 | None and | None and | None and | None |
| I | Stage 1-2 and | None and | None | None |
| II | Stage 3 and/or | Stage 1 and/or | Stage 1 and/or | Stage 1 |
| III | None-Stage 3 | Stage 2-3 or | Stage 2-4 | N/A |
| | with | | | |
| IV | Stage 4 or | Stage 4 | N/A | N/A |

### Inducible Caspase-9 as a “Safety Switch” for Cell Therapy and for Genetically Engineered Cell Transplantation

[0287] By reducing the effect of graft versus host disease is meant, for example, a decrease in the GvHD symptoms so that the patient may be assigned a lower level stage, or, for example, a reduction of a symptom of graft versus host disease by at least 20%, 30%, 40%, 50%, 60%, 70%, 80%, 90%, 95%, or 99%. A reduction in the effect of graft versus host disease may also be measured by detection of a reduction in activated T cells involved in the GvHD reaction, such as, for example, a reduction of cells that express the marker protein, for example CD19, and express CD3 (CD3⁺ CD19⁺ cells, for example) by at least 30%, 40%, 50%, 60%, 70%, 75%, 80%, 85%, 90%, 95%, or 99%.

[0288] Provided herein is an alternative suicide gene strategy that is based on human proapoptotic molecules fused with an FKBP variant that is optimized to bind a chemical inducer of dimerization (CID). Variants may include, for example, an FKBP region that has an amino acid substitution at position 36 selected from the group consisting of valine, leucine, isoleuceine and alanine (Clackson T, et al., Proc Natl Acad Sci USA. 1998, 95:10437-10442). AP1903 is a synthetic molecule that has proven safe in healthy volunteers (luliucci J D, et al., J Clin Pharmacol. 2001, 41:870-879). Administration of this small molecule results in cross-linking and activation of the proapoptotic target molecules. The application of this inducible system in human T lymphocytes has been explored using Fas or the death effector domain (DED) of the Fas-associated death domain-containing protein (FADD) as proapoptotic molecules. Up to 90% of T cells transduced with these inducible death molecules underwent apoptosis after administration of CID (Thomis D C, et al., Blood. 2001, 97:1249-1257; Spencer D M, et al., Curr Biol. 1996, 6:839-847; Fan L, et al., Hum Gene Ther. 1999, 10:2273-2285; Berger C, et al., Blood. 2004, 103:1261-1269; Junker K, et al., Gene Ther. 2003, 10:1189-197). This suicide gene strategy may be used in any appropriate cell used for cell therapy including, for example, hematopoietic stem cells, and other progenitor cells, including, for example, mesenchymal stromal cells, embryonic stem cells, and inducible pluripotent stem cells. AP20187 and AP1950, a synthetic version of AP1903, may also be used as the ligand inducer. (Amara J F (97) PNAS 94:10618-23, Clontech Laboratories-Takara Bio).

[0289] Therefore, this safety switch, catalyzed by Caspase-9, may be used where there is a condition in the cell therapy patient that requires the removal of the transfected or transduced therapeutic cells. Conditions where the cells may need to be removed include, for example, GvHD, inappropriate differentiation of the cells into more mature cells of the wrong tissue or cell type, and other toxicities. To activate the Caspase-9 switch in the case of inappropriate differentiation, it is possible to use tissue specific promoters. For example, where a progenitor cell differentiates into bone and fat cells, and the fat cells are not desired, the vector used to transfect or transduce the progenitor cell may have a fat cell specific promoter that is operably linked to the Caspase-9 nucleotide sequence. In this way, should the cells differentiate into fat cells, upon administration of the multimer ligand, apoptosis of the inappropriately differentiated fat cells should result. The methods may be used, for example, for any disorder that can be alleviated by cell therapy, including cancer, cancer in the blood or bone marrow, other blood or bone marrow borne diseases such as sickle cell anemia and metachromic leukodystrophy, and any disorder that can be alleviated by a stem cell transplantation, for example blood or bone marrow disorders such as sickle cell anemia or metachromal leukodystrophy.

[0290] The efficacy of adoptive immunotherapy may be enhanced by rendering the therapeutic T cells resistant to immune evasion strategies employed by tumor cells. In vitro studies have shown that this can be achieved by transduction with a dominant-negative receptor or an immunomodulatory cytokine (Bollard C M, et al., Blood. 2002, 99:3179-3187: Wagner H J, et al., Cancer Gene Ther. 2004, 11:81-91). Moreover, transfer of antigen-specific T-cell receptors allows for the application of T-cell therapy to a broader range of tumors (Pule M, et al., Cytotherapy. 2003, 5:211-226; Schumacher T N, Nat Rev Immunol. 2002, 2:512-519). A suicide system for engineered human T cells was developed and tested to allow their subsequent use in clinical studies. Caspase-9 has been modified and shown to be stably expressed in human T lymphocytes without compromising their functional and phenotypic characteristics while demonstrating sensitivity to CID, even in T cells that have upregulated antiapoptotic molecules. (Straathof, K. C., et al., 2005, Blood 105:4248-54).

[0291] In genetically modified cells used for gene therapy, the gene may be a heterologous polynucleotide sequence derived from a source other than the cell that is used to express the gene. The gene is derived from a prokaryotic or eukaryotic source such as a bacterium, a virus, yeast, a parasite, a plant, or even an animal. The heterologous DNA also is derived from more than one source, i.e., a multigene construct or a fusion protein. The heterologous DNA also may include a regulatory sequence, which is derived from one source and the gene from a different source. Or, the heterologous DNA may include regulatory sequences that are used to change the normal expression of a cellular endogenous gene.

### Other Caspase Molecules

[0292] Caspase polypeptides other than Caspase-9 that may be encoded by the chimeric polypeptides of the current technology include, for example, Caspase-1, Caspase-3, and Caspase-8. Discussions of these Caspase polypeptides may be found in, for example, MacCorkle, R. A., et al., Proc. Natl. Acad. Sci. U.S.A. (1998) 95:3655-3660; and Fan, L., et al. (1999) Human Gene Therapy 10:2273-2285).

### Engineering Expression Constructs

[0293] Expression constructs encode a multimeric ligand binding region and a Caspase-9 polypeptide, or, in certain embodiments a multimeric ligand binding region and a Caspase-9 polypeptide linked to a marker polypeptide, all operatively linked. In general, the term “operably linked” is meant to indicate that the promoter sequence is functionally linked to a second sequence, wherein, for example, the promoter sequence initiates and mediates transcription of the DNA corresponding to the second sequence. The Caspase-9 polypeptide may be full length or truncated. In certain embodiments, the marker polypeptide is linked to the Caspase-9 polypeptide. For example, the marker polypeptide may be linked to the Caspase-9 polypeptide via a polypeptide sequence, such as, for example, a cleavable 2A-like sequence. The marker polypeptide may be, for example, CD19, or may be, for example, a heterologous protein, selected to not affect the activity of the chimeric caspase polypeptide.

[0294] In some embodiments, the polynucleotide may encode the Caspase-9 polypeptide and a heterologous protein, which may be, for example a marker polypeptide and may be, for example, a chimeric antigen receptor. The heterologous polypeptide, for example, the chimeric antigen receptor, may be linked to the Caspase-9 polypeptide via a polypeptide sequence, such as, for example, a cleavable 2A-like sequence.

[0295] In certain examples, a nucleic acid comprising a polynucleotide coding for a chimeric antigen receptor is included in the same vector, such as, for example, a viral or plasmid vector, as a polynucleotide coding for a second polypeptide. This second polypeptide may be, for example, a caspase polypeptide, as discussed herein, or a marker polypeptide. In these examples, the construct may be designed with one promoter operably linked to a nucleic acid comprising a polynucleotide coding for the two polypeptides, linked by a cleavable 2A polypeptide. In this example, the first and second polypeptides are separated during translation, resulting in a chimeric antigen receptor polypeptide, and the second polypeptide. In other examples, the two polypeptides may be expressed separately from the same vector, where each nucleic acid comprising a polynucleotide coding for one of the polypeptides is operably linked to a separate promoter. In yet other examples, one promoter may be operably linked to the two nucleic acids, directing the production of two separate RNA transcripts, and thus two polypeptides. Therefore, the expression constructs discussed herein may comprise at least one, or at least two promoters. 2A-like sequences, or “cleavable” 2A sequences, are derived from, for example, many different viruses, including, for example, from Thosea asigna. These sequences are sometimes also known as “peptide skipping sequences.” When this type of sequence is placed within a cistron, between two peptides that are intended to be separated, the ribosome appears to skip a peptide bond, in the case of Thosea asigna sequence, the bond between the Gly and Pro amino acids is omitted. This leaves two polypeptides, in this case the Caspase-9 polypeptide and the marker polypeptide. When this sequence is used, the peptide that is encoded 5′ of the 2A sequence may end up with additional amino acids at the carboxy terminus, including the Gly residue and any upstream in the 2A sequence. The peptide that is encoded 3′ of the 2A sequence may end up with additional amino acids at the amino terminus, including the Pro residue and any downstream in the 2A sequence. “2A” or “2A-like” sequences are part of a large family of peptides that can cause peptide bond-skipping. Various 2A sequences have been characterized (e.g., F2A, P2A, T2A), and are examples of 2A-like sequences that may be used in the polypeptides of the present application. In certain embodiments, the 2A linker comprises the amino acid sequence of SEQ ID NO: 614; in certain embodiments the 2A linker consists of the amino acid sequence of SEQ ID NO: 614. In some embodiments, the 2A linker comprises the amino acid sequence of SEQ ID NO: 998; in some embodiments the 2A linker consists of the amino acid sequence of SEQ ID NO: 998. In certain embodiments, the 2A linker further comprises a GSG amino acid sequence (SEQ ID NO: 151) at the amino terminus of the polypeptide, in other embodiments, the 2A linker comprises a GSGPR amino acid sequence (SEQ ID NO: 925) at the amino terminus of the polypeptide. Thus, by a “2A” sequence, the term may refer to the 2A sequence as listed herein, or may also refer to a 2A sequence as listed herein further comprising a GSG (SEQ ID NO: 151) or GSGPR sequence (SEQ ID NO: 925) at the amino terminus of the linker.

[0296] The expression construct may be inserted into a vector, for example a viral vector or plasmid. The steps of the methods provided may be performed using any suitable method; these methods include, without limitation, methods of transducing, transforming, or otherwise providing nucleic acid to the antigen-presenting cell, presented herein. In some embodiments, the truncated Caspase-9 polypeptide is encoded by the nucleotide sequence of SEQ ID NO 8, SEQ ID NO: 23, SEQ ID NO: 25, SEQ ID NO: 27, or a functionally equivalent fragment thereof, with or without DNA linkers, or has the amino acid sequence of SEQ ID NO: 9, SEQ ID NO: 24, SEQ ID NO: 26, or SEQ ID NO: 28 or a functionally equivalent fragment thereof. In some embodiments, the CD19 polypeptide is encoded by the nucleotide sequence of SEQ ID NO 14, or a functionally equivalent fragment thereof, with or without DNA linkers, or has the amino acid sequence of SEQ ID NO: 15, or a functionally equivalent fragment thereof. A functionally equivalent fragment of the Caspase-9 polypeptide has substantially the same ability to induce apoptosis as the polypeptide of SEQ ID NO: 9, with at least 50%, 60%, 70%, 80%, 90%, or 95% of the activity of the polypeptide of SEQ ID NO: 9. A functionally equivalent fragment of the CD19 polypeptide has substantially the same ability as the polypeptide of SEQ ID No: 15, to act as a marker to be used to identify and select transduced or transfected cells, with at least 50%, 60%, 70%, 80%, 90%, or 95% of the marker polypeptide being detected when compared to the polypeptide of SEQ ID NO: 15, using standard detection techniques.

[0297] More particularly, more than one ligand binding domain or multimerizing region may be used in the expression construct. Yet further, the expression construct contains a membrane-targeting sequence. Appropriate expression constructs may include a co-stimulatory polypeptide element on either side of the above FKBP ligand binding elements.

[0298] In certain examples, the polynucleotide coding for the inducible caspase polypeptide is included in the same vector, such as, for example, a viral or plasmid vector, as a polynucleotide coding for a chimeric antigen receptor. In these examples, the construct may be designed with one promoter operably linked to a nucleic acid comprising a nucleotide sequence coding for the two polypeptides, linked by a cleavable 2A polypeptide. In this example, the first and second polypeptides are cleaved after expression, resulting in a chimeric antigen receptor polypeptide and an inducible Caspase-9 polypeptide. In other examples, the two polypeptides may be expressed separately from the same vector, where each nucleic acid comprising a nucleotide sequence coding for one of the polypeptides is operably linked to a separate promoter. In yet other examples, one promoter may be operably linked to the two nucleic acids, directing the production of two separate RNA transcripts, and thus two polypeptides. Therefore, the expression constructs discussed herein may comprise at least one, or at least two promoters.

[0299] In yet other examples, two polypeptides may be expressed in a cell using two separate vectors. The cells may be co-transfected or co-transformed with the vectors, or the vectors may be introduced to the cells at different times.

### Ligand Binding Regions

[0300] The ligand binding (“dimerization”) domain, or multimerizing region, of the expression construct can be any convenient domain that will allow for induction using a natural or unnatural ligand, for example, an unnatural synthetic ligand. The multimerizing region can be internal or external to the cellular membrane, depending upon the nature of the construct and the choice of ligand.

[0301] A wide variety of ligand binding proteins, including receptors, are known, including ligand binding proteins associated with the cytoplasmic regions indicated above. As used herein the term “ligand binding domain” can be interchangeable with the term “receptor”. Of particular interest are ligand binding proteins for which ligands (for example, small organic ligands) are known or may be readily produced. These ligand binding domains or receptors include the FKBPs and cyclophilin receptors, the steroid receptors, the tetracycline receptor, the other receptors indicated above, and the like, as well as “unnatural” receptors, which can be obtained from antibodies, particularly the heavy or light chain subunit, mutated sequences thereof, random amino acid sequences obtained by stochastic procedures, combinatorial syntheses, and the like. In certain embodiments, the ligand binding region is selected from the group consisting of FKBP ligand binding region, cyclophilin receptor ligand binding region, steroid receptor ligand binding region, cyclophilin receptors ligand binding region, and tetracycline receptor ligand binding region. Often, the ligand binding region comprises a FᵥFᵥₗₛ sequence. Sometimes, the Fᵥ Fᵥₗₛ sequence further comprises an additional Fᵥ sequence. Examples include, for example, those discussed in Kopytek, S. J., et al., Chemistry & Biology 7:313-321 (2000) and in Gestwicki, J. E., et al., Combinatorial Chem. & High Throughput Screening 10:667-675 (2007); Clackson T (2006) Chem Biol Drug Des 67:440-2; Clackson, T., in Chemical Biology: From Small Molecules to Systems Biology and Drug Design (Schreiber, s., et al., eds., Wiley, 2007)).

[0302] For the most part, the ligand binding domains or receptor domains will be at least about 50 amino acids, and fewer than about 350 amino acids, usually fewer than 200 amino acids, either as the natural domain or truncated active portion thereof. The binding domain may, for example, be small (<25 kDa, to allow efficient transfection in viral vectors), monomeric, nonimmunogenic, have synthetically accessible, cell permeable, nontoxic ligands that can be configured for dimerization.

[0303] The receptor domain can be intracellular or extracellular depending upon the design of the expression construct and the availability of an appropriate ligand. For hydrophobic ligands, the binding domain can be on either side of the membrane, but for hydrophilic ligands, particularly protein ligands, the binding domain will usually be external to the cell membrane, unless there is a transport system for internalizing the ligand in a form in which it is available for binding. For an intracellular receptor, the construct can encode a signal peptide and transmembrane domain 5′ or 3′ of the receptor domain sequence or may have a lipid attachment signal sequence 5′ of the receptor domain sequence. Where the receptor domain is between the signal peptide and the transmembrane domain, the receptor domain will be extracellular.

[0304] The portion of the expression construct encoding the receptor can be subjected to mutagenesis for a variety of reasons. The mutagenized protein can provide for higher binding affinity, allow for discrimination by the ligand of the naturally occurring receptor and the mutagenized receptor, provide opportunities to design a receptor-ligand pair, or the like. The change in the receptor can involve changes in amino acids known to be at the binding site, random mutagenesis using combinatorial techniques, where the codons for the amino acids associated with the binding site or other amino acids associated with conformational changes can be subject to mutagenesis by changing the codon(s) for the particular amino acid, either with known changes or randomly, expressing the resulting proteins in an appropriate prokaryotic host and then screening the resulting proteins for binding.

[0305] Antibodies and antibody subunits, e.g., heavy or light chain, particularly fragments, more particularly all or part of the variable region, or fusions of heavy and light chain to create high-affinity binding, can be used as the binding domain. Antibodies that are contemplated include ones that are an ectopically expressed human product, such as an extracellular domain that would not trigger an immune response and generally not expressed in the periphery (i.e., outside the CNS/brain area). Such examples, include, but are not limited to low affinity nerve growth factor receptor (LNGFR), and embryonic surface proteins (i.e., carcinoembryonic antigen). Yet further, antibodies can be prepared against haptenic molecules, which are physiologically acceptable, and the individual antibody subunits screened for binding affinity. The cDNA encoding the subunits can be isolated and modified by deletion of the constant region, portions of the variable region, mutagenesis of the variable region, or the like, to obtain a binding protein domain that has the appropriate affinity for the ligand. In this way, almost any physiologically acceptable haptenic compound can be employed as the ligand or to provide an epitope for the ligand. Instead of antibody units, natural receptors can be employed, where the binding domain is known and there is a useful ligand for binding.

### Oligomerization

[0306] The transduced signal will normally result from ligand-mediated oligomerization of the chimeric protein molecules, i.e., as a result of oligomerization following ligand binding, although other binding events, for example allosteric activation, can be employed to initiate a signal. The construct of the chimeric protein will vary as to the order of the various domains and the number of repeats of an individual domain.

[0307] For multimerizing the receptor, the ligand for the ligand binding domains/receptor domains of the chimeric surface membrane proteins will usually be multimeric in the sense that it will have at least two binding sites, with each of the binding sites capable of binding to the ligand receptor domain. By “multimeric ligand binding region” is meant a ligand binding region that binds to a multimeric ligand. The term “multimeric ligands” include dimeric ligands. A dimeric ligand will have two binding sites capable of binding to the ligand receptor domain. Desirably, the subject ligands will be a dimer or higher order oligomer, usually not greater than about tetrameric, of small synthetic organic molecules, the individual molecules typically being at least about 150 Da and less than about 5 kDa, usually less than about 3 kDa. A variety of pairs of synthetic ligands and receptors can be employed. For example, in embodiments involving natural receptors, dimeric FK506 can be used with an FKBP12 receptor, dimerized cyclosporin A can be used with the cyclophilin receptor, dimerized estrogen with an estrogen receptor, dimerized glucocorticoids with a glucocorticoid receptor, dimerized tetracycline with the tetracycline receptor, dimerized vitamin D with the vitamin D receptor, and the like. Alternatively, higher orders of the ligands, e.g., trimeric can be used. For embodiments involving unnatural receptors, e.g., antibody subunits, modified antibody subunits, single chain antibodies comprised of heavy and light chain variable regions in tandem, separated by a flexible linker domain, or modified receptors, and mutated sequences thereof, and the like, any of a large variety of compounds can be used. A significant characteristic of these ligand units is that each binding site is able to bind the receptor with high affinity and they are able to be dimerized chemically. Also, methods are available to balance the hydrophobicity/hydrophilicity of the ligands so that they are able to dissolve in serum at functional levels, yet diffuse across plasma membranes for most applications.

[0308] In certain embodiments, the present methods utilize the technique of chemically induced dimerization (CID) to produce a conditionally controlled protein or polypeptide. In addition to this technique being inducible, it also is reversible, due to the degradation of the labile dimerizing agent or administration of a monomeric competitive inhibitor. The CID system uses synthetic bivalent ligands to rapidly crosslink signaling molecules that are fused to ligand binding domains. This system has been used to trigger the oligomerization and activation of cell surface (Spencer, D. M., et al., Science, 1993. 262: p. 1019-1024; Spencer D. M. et al., Curr Biol 1996, 6:839-847; Blau, C. A. et al., Proc Natl Acad. Sci. USA 1997, 94:3076-3081), or cytosolic proteins (Luo, Z. et al., Nature 1996, 383:181-185; MacCorkle, R. A. et al., Proc Natl Acad Sci USA 1998, 95:3655-3660), the recruitment of transcription factors to DNA elements to modulate transcription (Ho, S. N. et al., Nature 1996, 382:822-826; Rivera, V. M. et al., Nat. Med. 1996, 2:1028-1032) or the recruitment of signaling molecules to the plasma membrane to stimulate signaling (Spencer D. M. et al., Proc. Natl. Acad. Sci. USA 1995, 92:9805-9809; Holsinger, L. J. et al., Proc. Natl. Acad. Sci. USA 1995, 95:9810-9814).

[0309] The CID system is based upon the notion that surface receptor aggregation effectively activates downstream signaling cascades. In the simplest embodiment, the CID system uses a dimeric analog of the lipid permeable immunosuppressant drug, FK506, which loses its normal bioactivity while gaining the ability to crosslink molecules genetically fused to the FK506-binding protein, FKBP12. By fusing one or more FKBPs to Caspase-9, one can stimulate Caspase-9 activity in a dimerizer drug-dependent, but ligand and ectodomain-independent manner. This provides the system with temporal control, reversibility using monomeric drug analogs, and enhanced specificity. The high affinity of third-generation AP20187/AP1903 CIDs for their binding domain, FKBP12, permits specific activation of the recombinant receptor in vivo without the induction of non-specific side effects through endogenous FKBP12. FKBP12 variants having amino acid substitutions and deletions, such as FKBP12v36, that bind to a dimerizer drug, may also be used. FKBP12 variants include, but are not limited to, those having amino acid substitutions at position 36, selected from the group consisting of valine, leucine, isoleuceine, and alanine. In addition, the synthetic ligands are resistant to protease degradation, making them more efficient at activating receptors in vivo than most delivered protein agents.

[0310] By FKBP12 is meant the wild type FKBP12 polypeptide, or analogs or derivatives thereof that may comprise amino acid substitutions, that maintains FKBP12 binding activity to rapamycin; FKBP12 polypeptides or polypeptide regions bind to rimiducid with at least 100 times less affinity than FKBP12v36 polypeptides. In some examples, the FKBP12 polypeptide binds to a ligand, such as rimiducid, with at least 100 times less affinity than an FKBP12 variant polypeptide consisting of the amino acid sequence of SEQ ID NO: 977.

[0311] By FKBP12 variant polypeptide if meant an FKBP12 polypeptide that binds to a ligand, such as rimiducid with at least 100 times more affinity than a wild type FKBP12 polypeptide, such as, for example, the wild type FKBP12 polypeptide consisting of the amino acid sequence of SEQ ID NO: 929.

[0312] The ligands used are capable of binding to two or more of the ligand binding domains. The chimeric proteins may be able to bind to more than one ligand when they contain more than one ligand binding domain. The ligand is typically a non-protein or a chemical. Exemplary ligands include, but are not limited to FK506 (e.g., FK1012).

[0313] Other ligand binding regions may be, for example, dimeric regions, or modified ligand binding regions with a wobble substitution, such as, for example, FKBP12 (V36): The human 12 kDa FK506-binding protein with an F36 to V substitution, the complete mature coding sequence (amino acids 1-107), provides a binding site for synthetic dimerizer drug AP1903 (Jemal, A. et al., CA Cancer J. Clinic. 58, 71-96 (2008); Scher, H. I. and Kelly, W. K., Journal of Clinical Oncology 11, 1566-72 (1993)). Two tandem copies of the protein may also be used in the construct so that higher-order oligomers are induced upon cross-linking by AP1903.

[0314] FKBP12 variants may also be used in the FKBP12/FRB multimerizing regions. Variants used in these fusions, in some embodiments, will bind to rapamycin, or rapalogs, but will bind to less affinity to rimiducid than, for example, FKBP12v36. Examples of FKBP12 variants include those from many species, including, for example, yeast. In one embodiment, the FKBP12 variant is FKBP12.6 (calstablin).

[0315] Other heterodimers are contemplated in the present application. In one embodiment, a calcineurin-A polypeptide, or region may be used in place of the FRB multimerizing region. In some embodiments, the first unit of the first multimerizing region is a calcineurin-A polypeptide. In some embodiments, the first unit of the first multimerizing region is a calcineurin-A polypeptide region and the second unit of the first multimerizing region is a FKBP12 or FKBP12 variant multimerizing region. In some embodiments, the first unit of the first multimerizing region is a FKBP12 or FKBP12 variant multimerizing region and the second unit of the first multimerizing region is a calcineuring-A polypeptide region. In these embodiments, the first ligand comprises, for example, cyclosporine.

[0316] F36V′-FKBP: F36V′-FKBP is a codon-wobbled version of F36V-FKBP. It encodes the identical polypeptide sequence as F36V-FKPB but has only 62% homology at the nucleotide level. F36V′-FKBP was designed to reduce recombination in retroviral vectors (Schellhammer, P. F. et al., J. Urol. 157, 1731-5 (1997)). F36V′-FKBP was constructed by a PCR assembly procedure. The transgene contains one copy of F36V′-FKBP linked directly to one copy of F36V-FKBP.

[0317] In some embodiments, the ligand is a small molecule. The appropriate ligand for the selected ligand binding region may be selected. Often, the ligand is dimeric, sometimes, the ligand is a dimeric FK506 or a dimeric FK506-like analog. In certain embodiments, the ligand is AP1903 (CAS Index Name: 2-Piperidinecarboxylic acid, 1-[(2S)-1-oxo-2-(3,4,5-trimethoxyphenyl)butyl]-, 1,2-ethanediylbis [imino(2-oxo-2,1-ethanediyl)oxy-3,1-phenylene[(1R)-3-(3,4-dimethoxyphenyl)propylidene]] ester, [2S-[1 (R*),2R*[S*[S*[1 (R*),2R*]]]]]-(9CI) CAS Registry Number: 195514-63-7; Molecular Formula: C78H98N4020 Molecular Weight: 1411.65). In certain embodiments, the ligand is AP20187. In certain embodiments, the ligand is an AP20187 analog, such as, for example, AP1510. In some embodiments, certain analogs will be appropriate for the FKBP12, and certain analogs appropriate for the wobbled version of FKBP12. In certain embodiments, one ligand binding region is included in the chimeric protein. In other embodiments, two or more ligand binding regions are included. Where, for example, the ligand binding region is FKBP12, where two of these regions are included, one may, for example, be the wobbled version.

[0318] Other dimerization systems contemplated include the coumermycin/DNA gyrase B system. Coumermycin-induced dimerization activates a modified Raf protein and stimulating the MAP kinase cascade. See Farrar, M. A., et. A1., (1996) Nature 383, 178-181. In other embodiments, the abscisic acid (ABA) system developed by GR Crabtree and colleagues (Liang F S, et al., Sci Signal. 2011 Mar. 15; 4 (164): rs2), may be used, but like DNA gyrase B, this relies on a foreign protein, which would be immunogenic.

### Membrane-Targeting

[0319] A membrane-targeting sequence or region provides for transport of the chimeric protein to the cell surface membrane, where the same or other sequences can encode binding of the chimeric protein to the cell surface membrane. Molecules in association with cell membranes contain certain regions that facilitate the membrane association, and such regions can be incorporated into a chimeric protein molecule to generate membrane-targeted molecules. For example, some proteins contain sequences at the N-terminus or C-terminus that are acylated, and these acyl moieties facilitate membrane association. Such sequences are recognized by acyltransferases and often conform to a particular sequence motif. Certain acylation motifs are capable of being modified with a single acyl moiety (often followed by several positively charged residues (e.g. human c-Src: M-G-S-N-K-S-K-P-K-D-A-S-Q-R-R-R (SEQ ID NO: 283)) to improve association with anionic lipid head groups) and others are capable of being modified with multiple acyl moieties. For example, the N-terminal sequence of the protein tyrosine kinase Src can comprise a single myristoyl moiety. Dual acylation regions are located within the N-terminal regions of certain protein kinases, such as a subset of Src family members (e.g., Yes, Fyn, Lck) and G-protein alpha subunits. Such dual acylation regions often are located within the first eighteen amino acids of such proteins, and conform to the sequence motif Met-Gly-Cys-Xaa-Cys (SEQ ID NO: 284), where the Met is cleaved, the Gly is N-acylated and one of the Cys residues is S-acylated. The Gly often is myristoylated and a Cys can be palmitoylated. Acylation regions conforming to the sequence motif Cys-Ala-Ala-Xaa (so called “CAAX boxes”), which can modified with C15 or C10 isoprenyl moieties, from the C-terminus of G-protein gamma subunits and other proteins (e.g., World Wide Web address ebi.ac.uk/interpro/DisplaylproEntry?ac=IPR001230) also can be utilized. These and other acylation motifs include, for example, those discussed in Gauthier-Campbell et al., Molecular Biology of the Cell 15:2205-2217 (2004); Glabati et al., Biochem. J. 303:697-700 (1994) and Zlakine et al., J. Cell Science 110:673-679 (1997), and can be incorporated in chimeric molecules to induce membrane localization. In certain embodiments, a native sequence from a protein containing an acylation motif is incorporated into a chimeric protein. For example, in some embodiments, an N-terminal portion of Lck, Fyn or Yes or a G-protein alpha subunit, such as the first twenty-five N-terminal amino acids or fewer from such proteins (e.g., about 5 to about 20 amino acids, about 10 to about 19 amino acids, or about 15 to about 19 amino acids of the native sequence with optional mutations), may be incorporated within the N-terminus of a chimeric protein. In certain embodiments, a C-terminal sequence of about 25 amino acids or less from a G-protein gamma subunit containing a CAAX box motif sequence (e.g., about 5 to about 20 amino acids, about 10 to about 18 amino acids, or about 15 to about 18 amino acids of the native sequence with optional mutations) can be linked to the C-terminus of a chimeric protein.

[0320] In some embodiments, an acyl moiety has a log p value of +1 to +6, and sometimes has a log p value of +3 to +4.5. Log p values are a measure of hydrophobicity and often are derived from octanol/water partitioning studies, in which molecules with higher hydrophobicity partition into octanol with higher frequency and are characterized as having a higher log p value. Log p values are published for a number of lipophilic molecules and log p values can be calculated using known partitioning processes (e.g., Chemical Reviews, Vol. 71, Issue 6, page 599, where entry 4493 shows lauric acid having a log p value of 4.2). Any acyl moiety can be linked to a peptide composition discussed above and tested for antimicrobial activity using known methods and those discussed hereafter. The acyl moiety sometimes is a C1-C20 alkyl, C2-C20 alkenyl, C2-C20 alkynyl, C3-C6 cycloalkyl, C1-C4 haloalkyl, C4-C12 cyclalkylalkyl, aryl, substituted aryl, or aryl (C1-C4) alkyl, for example. Any acyl-containing moiety sometimes is a fatty acid, and examples of fatty acid moieties are propyl (C3), butyl (C4), pentyl (C5), hexyl (C6), heptyl (C7), octyl (C8), nonyl (C9), decyl (C10), undecyl (C11), lauryl (C12), myristyl (C14), palmityl (C16), stearyl (C18), arachidyl (C20), behenyl (C22) and lignoceryl moieties (C24), and each moiety can contain 0, 1, 2, 3, 4, 5, 6, 7 or 8 unsaturations (i.e., double bonds). An acyl moiety sometimes is a lipid molecule, such as a phosphatidyl lipid (e.g., phosphatidyl serine, phosphatidyl inositol, phosphatidyl ethanolamine, phosphatidyl choline), sphingolipid (e.g., shingomyelin, sphingosine, ceramide, ganglioside, cerebroside), or modified versions thereof. In certain embodiments, one, two, three, four or five or more acyl moieties are linked to a membrane association region. A chimeric protein herein also may include a single-pass or multiple pass transmembrane sequence (e.g., at the N-terminus or C-terminus of the chimeric protein). Single pass transmembrane regions are found in certain CD molecules, tyrosine kinase receptors, serine/threonine kinase receptors, TGFbeta, BMP, activin and phosphatases. Single pass transmembrane regions often include a signal peptide region and a transmembrane region of about 20 to about 25 amino acids, many of which are hydrophobic amino acids and can form an alpha helix. A short track of positively charged amino acids often follows the transmembrane span to anchor the protein in the membrane. Multiple pass proteins include ion pumps, ion channels, and transporters, and include two or more helices that span the membrane multiple times. All or substantially all of a multiple pass protein sometimes is incorporated in a chimeric protein. Sequences for single pass and multiple pass transmembrane regions are known and can be selected for incorporation into a chimeric protein molecule.

[0321] Any membrane-targeting sequence can be employed that is functional in the host and may, or may not, be associated with one of the other domains of the chimeric protein. In some embodiments, such sequences include, but are not limited to myristoylation-targeting sequence, palmitoylation-targeting sequence, prenylation sequences (i.e., farnesylation, geranyl-geranylation, CAAX Box), protein-protein interaction motifs or transmembrane sequences (utilizing signal peptides) from receptors. Examples include those discussed in, for example, ten Klooster J P et al, Biology of the Cell (2007) 99, 1-12, Vincent, S., et al., Nature Biotechnology 21:936-40, 1098 (2003).

[0322] Additional protein domains exist that can increase protein retention at various membranes. For example, an ˜120 amino acid pleckstrin homology (PH) domain is found in over 200 human proteins that are typically involved in intracellular signaling. PH domains can bind various phosphatidylinositol (PI) lipids within membranes (e.g. PI (3, 4, 5)-P3, PI (3,4)-P2, PI (4,5)-P2) and thus play a key role in recruiting proteins to different membrane or cellular compartments. Often the phosphorylation state of PI lipids is regulated, such as by PI-3 kinase or PTEN, and thus, interaction of membranes with PH domains are not as stable as by acyl lipids.

### AP1903 for Injection

[0323] AP1903 API is manufactured by Alphora Research Inc. and AP1903 Drug Product for Injection is made by Formatech Inc. It is formulated as a 5 mg/mL solution of AP1903 in a 25% solution of the non-ionic solubilizer Solutol HS 15 (250 mg/mL, BASF). At room temperature, this formulation is a clear, slightly yellow solution. Upon refrigeration, this formulation undergoes a reversible phase transition, resulting in a milky solution. This phase transition is reversed upon re-warming to room temperature. The fill is 2.33 mL in a 3 mL glass vial (˜10 mg AP1903 for Injection total per vial).

[0324] AP1903 is removed from the refrigerator the night before the patient is dosed and stored at a temperature of approximately 21° C. overnight, so that the solution is clear prior to dilution. The solution is prepared within 30 minutes of the start of the infusion in glass or polyethylene bottles or non-DEHP bags and stored at approximately 21° C. prior to dosing.

[0325] All study medication is maintained at a temperature between 2 degrees C. and 8 degrees C., protected from excessive light and heat, and stored in a locked area with restricted access.

[0326] Upon determining a need to administer AP1903 and induce the inducible Caspase-9 polypeptide, patients may be, for example, administered a single fixed dose of AP1903 for Injection (0.4 mg/kg) via IV infusion over 2 hours, using a non-DEHP, non-ethylene oxide sterilized infusion set. The dose of AP1903 is calculated individually for all patients, and is not to be recalculated unless body weight fluctuates by ≥10%. The calculated dose is diluted in 100 mL in 0.9% normal saline before infusion.

[0327] In a previous Phase 1 study of AP1903, 24 healthy volunteers were treated with single doses of AP1903 for Injection at dose levels of 0.01, 0.05, 0.1, 0.5 and 1.0 mg/kg infused IV over 2 hours. AP1903 plasma levels were directly proportional to dose, with mean Cₘₐₓ values ranging from approximately 10-1275 ng/ml over the 0.01-1.0 mg/kg dose range. Following the initial infusion period, blood concentrations demonstrated a rapid distribution phase, with plasma levels reduced to approximately 18, 7, and 1% of maximal concentration at 0.5, 2 and 10 hours post-dose, respectively. AP1903 for Injection was shown to be safe and well tolerated at all dose levels and demonstrated a favorable pharmacokinetic profile. luliucci J D, et al., J Clin Pharmacol. 41:870-9, 2001.

[0328] The fixed dose of AP1903 for injection used, for example, may be 0.4 mg/kg intravenously infused over 2 hours. The amount of AP1903 needed in vitro for effective signaling of cells is 10-100 nM (1600 Da MW). This equates to 16-160 μg/L or ˜0.016-1.6 mg/kg (1.6-160 μg/kg). Doses up to 1 mg/kg were well-tolerated in the Phase 1 study of AP1903 discussed above. Therefore, 0.4 mg/kg may be a safe and effective dose of AP1903 for this Phase I study in combination with the therapeutic cells.

### Selectable Markers

[0329] In certain embodiments, the expression constructs contain nucleic acid constructs whose expression is identified in vitro or in vivo by including a marker in the expression construct. Such markers would confer an identifiable change to the cell permitting easy identification of cells containing the expression construct. Usually the inclusion of a drug selection marker aids in cloning and in the selection of transformants. For example, genes that confer resistance to neomycin, puromycin, hygromycin, DHFR, GPT, zeocin and histidinol are useful selectable markers. Alternatively, enzymes such as Herpes Simplex Virus-I thymidine kinase (tk) are employed. Immunologic surface markers containing the extracellular, non-signaling domains or various proteins (e.g. CD34, CD19, LNGFR) also can be employed, permitting a straightforward method for magnetic or fluorescence antibody-mediated sorting. The selectable marker employed is not believed to be important, so long as it is capable of being expressed simultaneously with the nucleic acid encoding a gene product. Further examples of selectable markers include, for example, reporters such as GFP, EGFP, beta-gal or chloramphenicol acetyltransferase (CAT). In certain embodiments, the marker protein, such as, for example, CD19 is used for selection of the cells for transfusion, such as, for example, in immunomagnetic selection. As discussed herein, a CD19 marker is distinguished from an anti-CD19 antibody, or, for example, an scFv, TCR, or other antigen recognition moiety that binds to CD19. In some embodiments, a polypeptide may be included in the expression vector to aid in sorting cells. For example, the CD34 minimal epitope may be incorporated into the vector. In some embodiments, the expression vectors used to express the chimeric antigen receptors or chimeric stimulating molecules provided herein further comprise a polynucleotide that encodes the 16 amino acid CD34 minimal epitope. In some embodiments, such as certain embodiments provided in the examples herein, the CD34 minimal epitope is incorporated at the amino terminal position of the CD8 stalk.

### Transmembrane Regions

[0330] A chimeric antigen receptor herein may include a single-pass or multiple pass transmembrane sequence (e.g., at the N-terminus or C-terminus of the chimeric protein). Single pass transmembrane regions are found in certain CD molecules, tyrosine kinase receptors, serine/threonine kinase receptors, TGFβ, BMP, activin and phosphatases. Single pass transmembrane regions often include a signal peptide region and a transmembrane region of about 20 to about 25 amino acids, many of which are hydrophobic amino acids and can form an alpha helix. A short track of positively charged amino acids often follows the transmembrane span to anchor the protein in the membrane. Multiple pass proteins include ion pumps, ion channels, and transporters, and include two or more helices that span the membrane multiple times. All or substantially all of a multiple pass protein sometimes is incorporated in a chimeric protein. Sequences for single pass and multiple pass transmembrane regions are known and can be selected for incorporation into a chimeric protein molecule.

[0331] In some embodiments, the transmembrane domain is fused to the extracellular domain of the CAR. In one embodiment, the transmembrane domain that naturally is associated with one of the domains in the CAR is used. In other embodiments, a transmembrane domain that is not naturally associated with one of the domains in the CAR is used. In some instances, the transmembrane domain can be selected or modified by amino acid substitution (e.g., typically charged to a hydrophobic residue) to avoid binding of such domains to the transmembrane domains of the same or different surface membrane proteins to minimize interactions with other members of the receptor complex.

[0332] Transmembrane domains may, for example, be derived from the alpha, beta, or zeta chain of the T cell receptor, CD3-ε, CD3 ζ, CD4, CD5, CD8, CD8α, CD9, CD16, CD22, CD28, CD33, CD38, CD64, CD80, CD86, CD134, CD137, or CD154. Or, in some examples, the transmembrane domain may be synthesized de novo, comprising mostly hydrophobic residues, such as, for example, leucine and valine. In certain embodiments a short polypeptide linker may form the linkage between the transmembrane domain and the intracellular domain of the chimeric antigen receptor. The chimeric antigen receptors may further comprise a stalk, that is, an extracellular region of amino acids between the extracellular domain and the transmembrane domain. For example, the stalk may be a sequence of amino acids naturally associated with the selected transmembrane domain. In some embodiments, the chimeric antigen receptor comprises a CD8 transmembrane domain, in certain embodiments, the chimeric antigen receptor comprises a CD8 transmembrane domain, and additional amino acids on the extracellular portion of the transmembrane domain, in certain embodiments, the chimeric antigen receptor comprises a CD8 transmembrane domain and a CD8 stalk. The chimeric antigen receptor may further comprise a region of amino acids between the transmembrane domain and the cytoplasmic domain, which are naturally associated with the polypeptide from which the transmembrane domain is derived.

### Control Regions

### Promoters

[0333] The particular promoter employed to control the expression of a polynucleotide sequence of interest is not believed to be important, so long as it is capable of directing the expression of the polynucleotide in the targeted cell. Thus, where a human cell is targeted the polynucleotide sequence-coding region may, for example, be placed adjacent to and under the control of a promoter that is capable of being expressed in a human cell. Generally speaking, such a promoter might include either a human or viral promoter.

[0334] In various embodiments, the human cytomegalovirus (CMV) immediate early gene promoter, the SV40 early promoter, the Rous sarcoma virus long terminal repeat, β-actin, rat insulin promoter and glyceraldehyde-3-phosphate dehydrogenase can be used to obtain high-level expression of the coding sequence of interest. The use of other viral or mammalian cellular or bacterial phage promoters which are well known in the art to achieve expression of a coding sequence of interest is contemplated as well, provided that the levels of expression are sufficient for a given purpose. By employing a promoter with well-known properties, the level and pattern of expression of the protein of interest following transfection or transformation can be optimized.

[0335] Selection of a promoter that is regulated in response to specific physiologic or synthetic signals can permit inducible expression of the gene product. For example, in the case where expression of a transgene, or transgenes when a multicistronic vector is utilized, is toxic to the cells in which the vector is produced in, it is desirable to prohibit or reduce expression of one or more of the transgenes. Examples of transgenes that are toxic to the producer cell line are pro-apoptotic and cytokine genes. Several inducible promoter systems are available for production of viral vectors where the transgene products are toxic (add in more inducible promoters).

[0336] The ecdysone system (Invitrogen, Carlsbad, CA) is one such system. This system is designed to allow regulated expression of a gene of interest in mammalian cells. It consists of a tightly regulated expression mechanism that allows virtually no basal level expression of the transgene, but over 200-fold inducibility. The system is based on the heterodimeric ecdysone receptor of Drosophila, and when ecdysone or an analog such as muristerone A binds to the receptor, the receptor activates a promoter to turn on expression of the downstream transgene high levels of mRNA transcripts are attained. In this system, both monomers of the heterodimeric receptor are constitutively expressed from one vector, whereas the ecdysone-responsive promoter, which drives expression of the gene of interest, is on another plasmid. Engineering of this type of system into the gene transfer vector of interest would therefore be useful. Cotransfection of plasmids containing the gene of interest and the receptor monomers in the producer cell line would then allow for the production of the gene transfer vector without expression of a potentially toxic transgene. At the appropriate time, expression of the transgene could be activated with ecdysone or muristeron A.

[0337] Another inducible system that may be useful is the Tet-Off™ or Tet-On™ system (Clontech, Palo Alto, CA) originally developed by Gossen and Bujard (Gossen and Bujard, Proc. Natl. Acad. Sci. USA, 89:5547-5551, 1992; Gossen et al., Science, 268:1766-1769, 1995). This system also allows high levels of gene expression to be regulated in response to tetracycline or tetracycline derivatives such as doxycycline. In the Tet-On™ system, gene expression is turned on in the presence of doxycycline, whereas in the Tet-Off™ system, gene expression is turned on in the absence of doxycycline. These systems are based on two regulatory elements derived from the tetracycline resistance operon of E. coli, the tetracycline operator sequence to which the tetracycline repressor binds, and the tetracycline repressor protein. The gene of interest is cloned into a plasmid behind a promoter that has tetracycline-responsive elements present in it. A second plasmid contains a regulatory element called the tetracycline-controlled transactivator, which is composed, in the Tet-Off™ system, of the VP16 domain from the herpes simplex virus and the wild-type tetracycline repressor. Thus in the absence of doxycycline, transcription is constitutively on. In the Tet-On™ system, the tetracycline repressor is not wild type and in the presence of doxycycline activates transcription. For gene therapy vector production, the Tet-Off™ system may be used so that the producer cells could be grown in the presence of tetracycline or doxycycline and prevent expression of a potentially toxic transgene, but when the vector is introduced to the patient, the gene expression would be constitutively on.

[0338] In some circumstances, it is desirable to regulate expression of a transgene in a gene therapy vector. For example, different viral promoters with varying strengths of activity are utilized depending on the level of expression desired. In mammalian cells, the CMV immediate early promoter is often used to provide strong transcriptional activation. The CMV promoter is reviewed in Donnelly, J. J., et al., 1997. Annu. Rev. Immunol. 15:617-48. Modified versions of the CMV promoter that are less potent have also been used when reduced levels of expression of the transgene are desired. When expression of a transgene in hematopoietic cells is desired, retroviral promoters such as the LTRs from MLV or MMTV are often used. Other viral promoters that are used depending on the desired effect include SV40, RSV LTR, HIV-1 and HIV-2 LTR, adenovirus promoters such as from the E1A, E2A, or MLP region, AAV LTR, HSV-TK, and avian sarcoma virus.

[0339] In other examples, promoters may be selected that are developmentally regulated and are active in particular differentiated cells. Thus, for example, a promoter may not be active in a pluripotent stem cell, but, for example, where the pluripotent stem cell differentiates into a more mature cell, the promoter may then be activated.

[0340] Similarly tissue specific promoters are used to effect transcription in specific tissues or cells so as to reduce potential toxicity or undesirable effects to non-targeted tissues. These promoters may result in reduced expression compared to a stronger promoter such as the CMV promoter, but may also result in more limited expression, and immunogenicity (Bojak, A., et al., 2002. Vaccine. 20:1975-79; Cazeaux., N., et al., 2002. Vaccine 20:3322-31). For example, tissue specific promoters such as the PSA associated promoter or prostate-specific glandular kallikrein, or the muscle creatine kinase gene may be used where appropriate.

[0341] Examples of tissue specific or differentiation specific promoters include, but are not limited to, the following: B29 (B cells); CD14 (monocytic cells); CD43 (leukocytes and platelets); CD45 (hematopoietic cells); CD68 (macrophages); desmin (muscle); elastase-1 (pancreatic acinar cells); endoglin (endothelial cells); fibronectin (differentiating cells, healing tissues); and Flt-1 (endothelial cells); GFAP (astrocytes).

[0342] In certain indications, it is desirable to activate transcription at specific times after administration of the gene therapy vector. This is done with such promoters as those that are hormone or cytokine regulatable. Cytokine and inflammatory protein responsive promoters that can be used include K and T kininogen (Kageyama et al., (1987) J. Biol. Chem., 262, 2345-2351), c-fos, TNF-alpha, C-reactive protein (Arcone, et al., (1988) Nucl. Acids Res., 16 (8), 3195-3207), haptoglobin (Oliviero et al., (1987) EMBO J., 6, 1905-1912), serum amyloid A2, C/EBP alpha, IL-1, IL-6 (Poli and Cortese, (1989) Proc. Nat'l Acad. Sci. USA, 86, 8202-8206), Complement C3 (Wilson et al., (1990) Mol. Cell. Biol., 6181-6191), IL-8, alpha-1 acid glycoprotein (Prowse and Baumann, (1988) Mol Cell Biol, 8, 42-51), alpha-1 antitrypsin, lipoprotein lipase (Zechner et al., Mol. Cell. Biol., 2394-2401, 1988), angiotensinogen (Ron, et al., (1991) Mol. Cell. Biol., 2887-2895), fibrinogen, c-jun (inducible by phorbol esters, TNF-alpha, UV radiation, retinoic acid, and hydrogen peroxide), collagenase (induced by phorbol esters and retinoic acid), metallothionein (heavy metal and glucocorticoid inducible), Stromelysin (inducible by phorbol ester, interleukin-1 and EGF), alpha-2 macroglobulin and alpha-1 anti-chymotrypsin. Other promoters include, for example, SV40, MMTV, Human Immunodeficiency Virus (MV), Moloney virus, ALV, Epstein Barr virus, Rous Sarcoma virus, human actin, myosin, hemoglobin, and creatine.

[0343] It is envisioned that any of the above promoters alone or in combination with another can be useful depending on the action desired. Promoters, and other regulatory elements, are selected such that they are functional in the desired cells or tissue. In addition, this list of promoters should not be construed to be exhaustive or limiting; other promoters that are used in conjunction with the promoters and methods disclosed herein.

### Enhancers

[0344] Enhancers are genetic elements that increase transcription from a promoter located at a distant position on the same molecule of DNA. Early examples include the enhancers associated with immunoglobulin and T cell receptors that both flank the coding sequence and occur within several introns. Many viral promoters, such as CMV, SV40, and retroviral LTRs are closely associated with enhancer activity and are often treated like single elements. Enhancers are organized much like promoters. That is, they are composed of many individual elements, each of which binds to one or more transcriptional proteins. The basic distinction between enhancers and promoters is operational. An enhancer region as a whole stimulates transcription at a distance and often independent of orientation; this need not be true of a promoter region or its component elements. On the other hand, a promoter has one or more elements that direct initiation of RNA synthesis at a particular site and in a particular orientation, whereas enhancers lack these specificities. Promoters and enhancers are often overlapping and contiguous, often seeming to have a very similar modular organization. A subset of enhancers is locus-control regions (LCRs) that can not only increase transcriptional activity, but (along with insulator elements) can also help to insulate the transcriptional element from adjacent sequences when integrated into the genome. Any promoter/enhancer combination (as per the Eukaryotic Promoter Data Base EPDB) can be used to drive expression of the gene, although many will restrict expression to a particular tissue type or subset of tissues (reviewed in, for example, Kutzler, M. A., and Weiner, D. B., 2008. Nature Reviews Genetics 9:776-88). Examples include, but are not limited to, enhancers from the human actin, myosin, hemoglobin, muscle creatine kinase, sequences, and from viruses CMV, RSV, and EBV. Appropriate enhancers may be selected for particular applications. Eukaryotic cells can support cytoplasmic transcription from certain bacterial promoters if the appropriate bacterial polymerase is provided, either as part of the delivery complex or as an additional genetic expression construct.

### Polyadenylation Signals

[0345] Where a cDNA insert is employed, one will typically desire to include a polyadenylation signal to effect proper polyadenylation of the gene transcript. The nature of the polyadenylation signal is not believed to be crucial to the successful practice of the present methods, and any such sequence is employed such as human or bovine growth hormone and SV40 polyadenylation signals and LTR polyadenylation signals. One non-limiting example is the SV40 polyadenylation signal present in the pCEP3 plasmid (Invitrogen, Carlsbad, California). Also, contemplated as an element of the expression cassette is a terminator. These elements can serve to enhance message levels and to minimize read through from the cassette into other sequences. Termination or poly(A) signal sequences may be, for example, positioned about 11-30 nucleotides downstream from a conserved sequence (AAUAAA) at the 3′ end of the mRNA (Montgomery, D. L., et al., 1993. DNA Cell Biol. 12:777-83; Kutzler, M. A., and Weiner, D. B., 2008. Nature Rev. Gen. 9:776-88).

### 4. Initiation Signals and Internal Ribosome Binding Sites

[0346] A specific initiation signal also may be required for efficient translation of coding sequences. These signals include the ATG initiation codon or adjacent sequences. Exogenous translational control signals, including the ATG initiation codon, may need to be provided. The initiation codon is placed in-frame with the reading frame of the desired coding sequence to ensure translation of the entire insert. The exogenous translational control signals and initiation codons can be either natural or synthetic. The efficiency of expression may be enhanced by the inclusion of appropriate transcription enhancer elements.

[0347] In certain embodiments, the use of internal ribosome entry sites (IRES) elements is used to create multigene, or polycistronic messages. IRES elements are able to bypass the ribosome-scanning model of 5′ methylated cap-dependent translation and begin translation at internal sites (Pelletier and Sonenberg, Nature, 334:320-325, 1988). IRES elements from two members of the picornavirus family (polio and encephalomyocarditis) have been discussed (Pelletier and Sonenberg, 1988), as well an IRES from a mammalian message (Macejak and Sarnow, Nature, 353:90-94, 1991). IRES elements can be linked to heterologous open reading frames. Multiple open reading frames can be transcribed together, each separated by an IRES, creating polycistronic messages. By virtue of the IRES element, each open reading frame is accessible to ribosomes for efficient translation. Multiple genes can be efficiently expressed using a single promoter/enhancer to transcribe a single message (see U.S. Pat. Nos. 5,925,565 and 5,935,819, each herein incorporated by reference).

### Sequence Optimization

[0348] Protein production may also be increased by optimizing the codons in the transgene. Species specific codon changes may be used to increase protein production. Also, codons may be optimized to produce an optimized RNA, which may result in more efficient translation. By optimizing the codons to be incorporated in the RNA, elements such as those that result in a secondary structure that causes instability, secondary mRNA structures that can, for example, inhibit ribosomal binding, or cryptic sequences that can inhibit nuclear export of mRNA can be removed (Kutzler, M. A., and Weiner, D. B., 2008. Nature Rev. Gen. 9:776-88; Yan, J. et al., 2007. Mol. Ther. 15:411-21; Cheung, Y. K., et al., 2004. Vaccine 23:629-38; Narum., D. L., et al., 2001. 69:7250-55; Yadava, A., and Ockenhouse, C. F., 2003. Infect. Immun. 71:4962-69; Smith., J. M., et al., 2004. AIDS Res. Hum. Retroviruses 20:1335-47; Zhou, W., et al., 2002. Vet. Microbiol. 88:127-51; Wu, X., et al., 2004. Biochem. Biophys. Res. Commun. 313:89-96; Zhang, W., et al., 2006. Biochem. Biophys. Res. Commun. 349:69-78; Deml, L. A., et al., 2001. J. Virol. 75:1099-11001; Schneider, R. M., et al., 1997. J. Virol. 71:4892-4903; Wang, S. D., et al., 2006. Vaccine 24:4531-40; zur Megede, J., et al., 2000. J. Virol. 74:2628-2635). For example, the FBP12, the Caspase polypeptide, and the CD19 sequences may be optimized by changes in the codons.

### Leader Sequences

[0349] Leader sequences may be added to enhance the stability of mRNA and result in more efficient translation. The leader sequence is usually involved in targeting the mRNA to the endoplasmic reticulum. Examples include the signal sequence for the HIV-1 envelope glycoprotein (Env), which delays its own cleavage, and the IgE gene leader sequence (Kutzler, M. A., and Weiner, D. B., 2008. Nature Rev. Gen. 9:776-88; Li, V., et al., 2000. Virology 272:417-28; Xu, Z. L., et al. 2001. Gene 272:149-56; Malin, A. S., et al., 2000. Microbes Infect. 2:1677-85; Kutzler, M. A., et al., 2005. J. Immunol. 175:112-125; Yang, J. S., et al., 2002. Emerg. Infect. Dis. 8:1379-84; Kumar., S., et al., 2006. DNA Cell Biol. 25:383-92; Wang, S., et al., 2006. Vaccine 24:4531-40). The IgE leader may be used to enhance insertion into the endoplasmic reticulum (Tepler, I, et al. (1989) J. Biol. Chem. 264:5912).

[0350] Expression of the transgenes may be optimized and/or controlled by the selection of appropriate methods for optimizing expression. These methods include, for example, optimizing promoters, delivery methods, and gene sequences, (for example, as presented in Laddy, D. J., et al., 2008. PLOS. ONE 3 e2517; Kutzler, M. A., and Weiner, D. B., 2008. Nature Rev. Gen. 9:776-88).

### Nucleic Acids

[0351] A “nucleic acid” as used herein generally refers to a molecule (one, two or more strands) of DNA, RNA or a derivative or analog thereof, comprising a nucleobase. A nucleobase includes, for example, a naturally occurring purine or pyrimidine base found in DNA (e.g., an adenine “A,” a guanine “G,” a thymine “T” or a cytosine “C”) or RNA (e.g., an A, a G, an uracil “U” or a C). The term “nucleic acid” encompasses the terms “oligonucleotide” and “polynucleotide,” each as a subgenus of the term “nucleic acid.” Nucleic acids may be, be at least, be at most, or be about 3, 4, 5, 6, 7, 8, 9, 10, 11, 12, 13, 14, 15, 16, 17, 18, 19, 20, 21, 22, 23, 24, 25, 26, 27, 28, 29, 30, 31, 32, 33, 34, 35, 36, 37, 38, 39, 40, 41, 42, 43, 44, 45, 46, 47, 48, 49, 50, 51, 52, 53, 54, 55, 56, 57, 58, 59, 60, 61, 62, 63, 64, 65, 66, 67, 68, 69, 70, 71, 72, 73, 74, 75, 76, 77, 78, 79, 80, 81, 82, 83, 84, 85, 86, 87, 88, 89, 90, 91, 92, 93, 94, 95, 96, 97, 98, 99, 100, 101, 102, 103, 104, 105, 106, 107, 108, 109, 110, 120, 130, 140, 150, 160, 170, 180, 190, 200, 210, 220, 230, 240, 250, 260, 270, 280, 290, 300, 310, 320, 330, 340, 350, 360, 370, 380, 390, 400, 410, 420, 430, 440, 441, 450, 460, 470, 480, 490, 500, 510, 520, 530, 540, 550, 560, 570, 580, 590, 600, 610, 620, 630, 640, 650, 660, 670, 680, 690, 700, 710, 720, 730, 740, 750, 760, 770, 780, 790, 800, 810, 820, 830, 840, 850, 860, 870, 880, 890, 900, 910, 920, 930, 940, 950, 960, 970, 980, 990, or 1000 nucleotides, or any range derivable therein, in length.

[0352] Nucleic acids herein provided may have regions of identity or complementarity to another nucleic acid. It is contemplated that the region of complementarity or identity can be at least 5 contiguous residues, though it is specifically contemplated that the region is, is at least, is at most, or is about 6, 7, 8, 9, 10, 11, 12, 13, 14, 15, 16, 17, 18, 19, 20, 21, 22, 23, 24, 25, 26, 27, 28, 29, 30, 31, 32, 33, 34, 35, 36, 37, 38, 39, 40, 41, 42, 43, 44, 45, 46, 47, 48, 49, 50, 51, 52, 53, 54, 55, 56, 57, 58, 59, 60, 61, 62, 63, 64, 65, 66, 67, 68, 69, 70, 71, 72, 73, 74, 75, 76, 77, 78, 79, 80, 81, 82, 83, 84, 85, 86, 87, 88, 89, 90, 91, 92, 93, 94, 95, 96, 97, 98, 99, 100, 110, 120, 130, 140, 150, 160, 170, 180, 190, 200, 210, 220, 230, 240, 250, 260, 270, 280, 290, 300, 310, 320, 330, 340, 350, 360, 370, 380, 390, 400, 410, 420, 430, 440, 441, 450, 460, 470, 480, 490, 500, 510, 520, 530, 540, 550, 560, 570, 580, 590, 600, 610, 620, 630, 640, 650, 660, 670, 680, 690, 700, 710, 720, 730, 740, 750, 760, 770, 780, 790, 800, 810, 820, 830, 840, 850, 860, 870, 880, 890, 900, 910, 920, 930, 940, 950, 960, 970, 980, 990, or 1000 contiguous nucleotides.

[0353] As used herein, “hybridization”, “hybridizes” or “capable of hybridizing” is understood to mean forming a double or triple stranded molecule or a molecule with partial double or triple stranded nature. The term “anneal” as used herein is synonymous with “hybridize.” The term “hybridization”, “hybridize(s)” or “capable of hybridizing” encompasses the terms “stringent condition(s)” or “high stringency” and the terms “low stringency” or “low stringency condition(s).”

[0354] As used herein “stringent condition(s)” or “high stringency” are those conditions that allow hybridization between or within one or more nucleic acid strand(s) containing complementary sequence(s), but preclude hybridization of random sequences. Stringent conditions tolerate little, if any, mismatch between a nucleic acid and a target strand. Such conditions are known, and are often used for applications requiring high selectivity. Non-limiting applications include isolating a nucleic acid, such as a gene or a nucleic acid segment thereof, or detecting at least one specific mRNA transcript or a nucleic acid segment thereof, and the like.

[0355] Stringent conditions may comprise low salt and/or high temperature conditions, such as provided by about 0.02 M to about 0.5 M NaCl at temperatures of about 42 degrees C. to about 70 degrees C. It is understood that the temperature and ionic strength of a desired stringency are determined in part by the length of the particular nucleic acid(s), the length and nucleobase content of the target sequence(s), the charge composition of the nucleic acid(s), and the presence or concentration of formamide, tetramethylammonium chloride or other solvent(s) in a hybridization mixture.

[0356] It is understood that these ranges, compositions and conditions for hybridization are mentioned by way of non-limiting examples only, and that the desired stringency for a particular hybridization reaction is often determined empirically by comparison to one or more positive or negative controls. Depending on the application envisioned varying conditions of hybridization may be employed to achieve varying degrees of selectivity of a nucleic acid towards a target sequence. In a non-limiting example, identification or isolation of a related target nucleic acid that does not hybridize to a nucleic acid under stringent conditions may be achieved by hybridization at low temperature and/or high ionic strength. Such conditions are termed “low stringency” or “low stringency conditions,” and non-limiting examples of low stringency include hybridization performed at about 0.15 M to about 0.9 M NaCl at a temperature range of about 20 degrees C. to about 50 degrees C. The low or high stringency conditions may be further modified to suit a particular application.

### Nucleic Acid Modification

[0357] Any of the modifications discussed below may be applied to a nucleic acid. Examples of modifications include alterations to the RNA or DNA backbone, sugar or base, and various combinations thereof. Any suitable number of backbone linkages, sugars and/or bases in a nucleic acid can be modified (e.g., independently about 5%, 10%, 15%, 20%, 25%, 30%, 35%, 40%, 45%, 50%, 55%, 60%, 65%, 70%, 75%, 80%, 85%, 90%, 95%, up to 100%). An unmodified nucleoside is any one of the bases adenine, cytosine, guanine, thymine, or uracil joined to the 1′ carbon of beta-D-ribo-furanose.

[0358] A modified base is a nucleotide base other than adenine, guanine, cytosine and uracil at a 1′ position. Non-limiting examples of modified bases include inosine, purine, pyridin-4-one, pyridin-2-one, phenyl, pseudouracil, 2, 4, 6-trimethoxy benzene, 3-methyl uracil, dihydrouridine, naphthyl, aminophenyl, 5-alkylcytidines (e.g., 5-methylcytidine), 5-alkyluridines (e.g., ribothymidine), 5-halouridine (e.g., 5-bromouridine) or 6-azapyrimidines or 6-alkylpyrimidines (e.g. 6-methyluridine), propyne, and the like. Other non-limiting examples of modified bases include nitropyrrolyl (e.g., 3-nitropyrrolyl), nitroindolyl (e.g., 4-, 5-, 6-nitroindolyl), hypoxanthinyl, isoinosinyl, 2-aza-inosinyl, 7-deaza-inosinyl, nitroimidazolyl, nitropyrazolyl, nitrobenzimidazolyl, nitroindazolyl, aminoindolyl, pyrrolopyrimidinyl, difluorotolyl, 4-fluoro-6-methylbenzimidazole, 4-methylbenzimidazole, 3-methyl isocarbostyrilyl, 5-methyl isocarbostyrilyl, 3-methyl-7-propynyl isocarbostyrilyl, 7-azaindolyl, 6-methyl-7-azaindolyl, imidizopyridinyl, 9-methyl-imidizopyridinyl, pyrrolopyrizinyl, isocarbostyrilyl, 7-propynyl isocarbostyrilyl, propynyl-7-azaindolyl, 2,4,5-trimethylphenyl, 4-methylindolyl, 4,6-dimethylindolyl, phenyl, napthalenyl, anthracenyl, phenanthracenyl, pyrenyl, stilbenyl, tetracenyl, pentacenyl and the like.

[0359] In some embodiments, for example, a nucleic acid may comprise modified nucleic acid molecules, with phosphate backbone modifications. Non-limiting examples of backbone modifications include phosphorothioate, phosphorodithioate, methylphosphonate, phosphotriester, morpholino, amidate carbamate, carboxymethyl, acetamidate, polyamide, sulfonate, sulfonamide, sulfamate, formacetal, thioformacetal, and/or alkylsilyl modifications. In certain instances, a ribose sugar moiety that naturally occurs in a nucleoside is replaced with a hexose sugar, polycyclic heteroalkyl ring, or cyclohexenyl group. In certain instances, the hexose sugar is an allose, altrose, glucose, mannose, gulose, idose, galactose, talose, or a derivative thereof. The hexose may be a D-hexose, glucose, or mannose. In certain instances, the polycyclic heteroalkyl group may be a bicyclic ring containing one oxygen atom in the ring. In certain instances, the polycyclic heteroalkyl group is a bicyclo[2.2.1]heptane, a bicyclo[3.2.1]octane, or a bicyclo[3.3.1]nonane.

[0360] Nitropyrrolyl and nitroindolyl nucleobases are members of a class of compounds known as universal bases. Universal bases are those compounds that can replace any of the four naturally occurring bases without substantially affecting the melting behavior or activity of the oligonucleotide duplex. In contrast to the stabilizing, hydrogen-bonding interactions associated with naturally occurring nucleobases, oligonucleotide duplexes containing 3-nitropyrrolyl nucleobases may be stabilized solely by stacking interactions. The absence of significant hydrogen-bonding interactions with nitropyrrolyl nucleobases obviates the specificity for a specific complementary base. In addition, 4-, 5- and 6-nitroindolyl display very little specificity for the four natural bases. Procedures for the preparation of 1-(2′-O-methyl-. beta.-D-ribofuranosyl)-5-nitroindole are discussed in Gaubert, G.; Wengel, J. Tetrahedron Letters 2004, 45, 5629. Other universal bases include hypoxanthinyl, isoinosinyl, 2-aza-inosinyl, 7-deaza-inosinyl, nitroimidazolyl, nitropyrazolyl, nitrobenzimidazolyl, nitroindazolyl, aminoindolyl, pyrrolopyrimidinyl, and structural derivatives thereof.

[0361] Difluorotolyl is a non-natural nucleobase that functions as a universal base. Difluorotolyl is an isostere of the natural nucleobase thymine. But unlike thymine, difluorotolyl shows no appreciable selectivity for any of the natural bases. Other aromatic compounds that function as universal bases are 4-fluoro-6-methylbenzimidazole and 4-methylbenzimidazole. In addition, the relatively hydrophobic isocarbostyrilyl derivatives 3-methyl isocarbostyrilyl, 5-methyl isocarbostyrilyl, and 3-methyl-7-propynyl isocarbostyrilyl are universal bases which cause only slight destabilization of oligonucleotide duplexes compared to the oligonucleotide sequence containing only natural bases. Other non-natural nucleobases include 7-azaindolyl, 6-methyl-7-azaindolyl, imidizopyridinyl, 9-methyl-imidizopyridinyl, pyrrolopyrizinyl, isocarbostyrilyl, 7-propynyl isocarbostyrilyl, propynyl-7-azaindolyl, 2,4,5-trimethylphenyl, 4-methylindolyl, 4,6-dimethylindolyl, phenyl, napthalenyl, anthracenyl, phenanthracenyl, pyrenyl, stilbenyl, tetracenyl, pentacenyl, and structural derivates thereof. For a more detailed discussion, including synthetic procedures, of difluorotolyl, 4-fluoro-6-methylbenzimidazole, 4-methylbenzimidazole, and other non-natural bases mentioned above, see: Schweitzer et al., J. Org. Chem., 59:7238-7242 (1994);

[0362] In addition, chemical substituents, for example cross-linking agents, may be used to add further stability or irreversibility to the reaction. Non-limiting examples of cross-linking agents include, for example, 1,1-bis(diazoacetyl)-2-phenylethane, glutaraldehyde, N-hydroxysuccinimide esters, for example, esters with 4-azidosalicylic acid, homobifunctional imidoesters, including disuccinimidyl esters such as 3,3′-dithiobis(succinimidylpropionate), bifunctional maleimides such as bis-N-maleimido-1,8-octane and agents such as methyl-3-[(p-azidophenyl) dithio]propioimidate.

[0363] A nucleotide analog may also include a “locked” nucleic acid. Certain compositions can be used to essentially “anchor” or “lock” an endogenous nucleic acid into a particular structure. Anchoring sequences serve to prevent disassociation of a nucleic acid complex, and thus not only can prevent copying but may also enable labeling, modification, and/or cloning of the endogeneous sequence. The locked structure may regulate gene expression (i.e. inhibit or enhance transcription or replication), or can be used as a stable structure that can be used to label or otherwise modify the endogenous nucleic acid sequence, or can be used to isolate the endogenous sequence, i.e. for cloning.

[0364] Nucleic acid molecules need not be limited to those molecules containing only RNA or DNA, but further encompass chemically-modified nucleotides and non-nucleotides. The percent of non-nucleotides or modified nucleotides may be from 1% to 100% (e.g., about 5, 10, 15, 20, 25, 30, 35, 40, 45, 50, 55, 60, 65, 70, 75, 80, 85, 90 or 95%).

### Nucleic Acid Preparation

[0365] In some embodiments, a nucleic acid is provided for use as a control or standard in an assay, or therapeutic, for example. A nucleic acid may be made by any technique known in the art, such as for example, chemical synthesis, enzymatic production or biological production. Nucleic acids may be recovered or isolated from a biological sample. The nucleic acid may be recombinant or it may be natural or endogenous to the cell (produced from the cell's genome). It is contemplated that a biological sample may be treated in a way so as to enhance the recovery of small nucleic acid molecules. Generally, methods may involve lysing cells with a solution having guanidinium and a detergent.

[0366] Nucleic acid synthesis may also be performed according to standard methods. Non-limiting examples of a synthetic nucleic acid (e.g., a synthetic oligonucleotide), include a nucleic acid made by in vitro chemical synthesis using phosphotriester, phosphite, or phosphoramidite chemistry and solid phase techniques or via deoxynucleoside H-phosphonate intermediates. Various different mechanisms of oligonucleotide synthesis have been disclosed elsewhere.

[0367] Nucleic acids may be isolated using known techniques. In particular embodiments, methods for isolating small nucleic acid molecules, and/or isolating RNA molecules can be employed. Chromatography is a process used to separate or isolate nucleic acids from protein or from other nucleic acids. Such methods can involve electrophoresis with a gel matrix, filter columns, alcohol precipitation, and/or other chromatography. If a nucleic acid from cells is to be used or evaluated, methods generally involve lysing the cells with a chaotropic (e.g., guanidinium isothiocyanate) and/or detergent (e.g., N-lauroyl sarcosine) prior to implementing processes for isolating particular populations of RNA.

[0368] Methods may involve the use of organic solvents and/or alcohol to isolate nucleic acids. In some embodiments, the amount of alcohol added to a cell lysate achieves an alcohol concentration of about 55% to 60%. While different alcohols can be employed, ethanol works well. A solid support may be any structure, and it includes beads, filters, and columns, which may include a mineral or polymer support with electronegative groups. A glass fiber filter or column is effective for such isolation procedures.

[0369] A nucleic acid isolation processes may sometimes include: a) lysing cells in the sample with a lysing solution comprising guanidinium, where a lysate with a concentration of at least about 1 M guanidinium is produced; b) extracting nucleic acid molecules from the lysate with an extraction solution comprising phenol; c) adding to the lysate an alcohol solution to form a lysate/alcohol mixture, wherein the concentration of alcohol in the mixture is between about 35% to about 70%; d) applying the lysate/alcohol mixture to a solid support; e) eluting the nucleic acid molecules from the solid support with an ionic solution; and, f) capturing the nucleic acid molecules. The sample may be dried down and resuspended in a liquid and volume appropriate for subsequent manipulation.

[0370] Provided herein are compositions or kits that comprise nucleic acid comprising the polynucleotides of the present application. Thus, compositions or kits may, for example, comprise both the first and second polynucleotides, encoding the first and second chimeric polypeptides. The nucleic acid may comprise more than one nucleic acid species, that is, for example, the first nucleic acid species comprises the first polynucleotide, and the second nucleic acid species comprises the second polynucleotide. In other examples, the nucleic acid may comprise both the first and second polynucleotides. The kit may, in addition, comprise the first or second ligand, or both. The kits may, in some embodiments, provide a nucleic acid composition, such as, for example, a virus, for example, a retrovirus, that comprises at least two polynucleotides, wherein the polynucleotides express, for example, an inducible pro-apoptotic polypeptide and a chimeric antigen receptor; an inducible pro-apoptotic polypeptide and a recombinant TCR; an inducible pro-apoptotic polypeptide and a chimeric costimulating polypeptide such as, for example an inducible chimeric MyD88 polypeptide, an inducible chimeric truncated MyD88 polypeptide, and optionally a CD40 polypeptide. The nucleic acid composition may comprise polynucleotides encoding an inducible pro-apoptotic polypeptide, an inducible chimeric MyD88 polypeptide or an inducible chimeric truncated MyD88 polypeptide, and optionally a CD40 polypeptide, and a chimeric antigen receptor or a recombinant T cell receptor.

[0371] Thus, in certain embodiments, kits are provided that comprise a nucleic acid composition such as, for example a virus, for example, a retrovirus, that comprises a polynucleotide that encodes 1) an iRC9 or iRmC9 polypeptide and an iM (MyD88FvFv) or iMC polypeptide; 2) an RC9 or iRmC9 polypeptide and a chimeric antigen receptor; 3) an iRC9 or iRmC9 polypeptide and a recombinant TCR; 4) an iC9 polypeptide and an iRMC or iRM (iRMyD88) polypeptide; 5) an iC9 polypeptide and an iRMC or iRM (iRMyD88) polypeptide and a chimeric antigen receptor; or 6) an iC9 polypeptide and an iRMC or iRM (iRMyD88) polypeptide and a recombinant T cell receptor.

### Methods of Gene Transfer

[0372] In order to mediate the effect of the transgene expression in a cell, it will be necessary to transfer the expression constructs into a cell. Such transfer may employ viral or non-viral methods of gene transfer. This section provides a discussion of methods and compositions of gene transfer. A transformed cell comprising an expression vector is generated by introducing into the cell the expression vector. Suitable methods for polynucleotide delivery for transformation of an organelle, a cell, a tissue or an organism for use with the current methods include virtually any method by which a polynucleotide (e.g., DNA) can be introduced into an organelle, a cell, a tissue or an organism. A host cell can, and has been, used as a recipient for vectors. Host cells may be derived from prokaryotes or eukaryotes, depending upon whether the desired result is replication of the vector or expression of part or all of the vector-encoded polynucleotide sequences. Numerous cell lines and cultures are available for use as a host cell, and they can be obtained through the American Type Culture Collection (ATCC), which is an organization that serves as an archive for living cultures and genetic materials.

[0373] An appropriate host may be determined. Generally, this is based on the vector backbone and the desired result. A plasmid or cosmid, for example, can be introduced into a prokaryote host cell for replication of many vectors. Bacterial cells used as host cells for vector replication and/or expression include DH5alpha, JM109, and KC8, as well as a number of commercially available bacterial hosts such as SURE® Competent Cells and SOLOPACK Gold Cells (STRATAGENE®, La Jolla, CA). Alternatively, bacterial cells such as E. coli LE392 could be used as host cells for phage viruses. Eukaryotic cells that can be used as host cells include, but are not limited to yeast, insects and mammals. Examples of mammalian eukaryotic host cells for replication and/or expression of a vector include, but are not limited to, HeLa, NIH3T3, Jurkat, 293, COS, CHO, Saos, and PC12. Examples of yeast strains include, but are not limited to, YPH499, YPH500 and YPH501.

[0374] Nucleic acid vaccines may include, for example, non-viral DNA vectors, “naked” DNA and RNA, and viral vectors. Methods of transforming cells with these vaccines, and for optimizing the expression of genes included in these vaccines are known and are also discussed herein.

### Examples of Methods of Nucleic Acid or Viral Vector Transfer

[0375] Any appropriate method may be used to transfect or transform the cells, or to administer the nucleotide sequences or compositions of the present methods. Certain examples are presented herein, and further include methods such as delivery using cationic polymers, lipid like molecules, and certain commercial products such as, for example, IN-VIVO-JET PEI.

### Ex Vivo Transformation

[0376] Various methods are available for transfecting vascular cells and tissues removed from an organism in an ex vivo setting. For example, canine endothelial cells have been genetically altered by retroviral gene transfer in vitro and transplanted into a canine (Wilson et al., Science, 244:1344-1346, 1989). In another example, Yucatan minipig endothelial cells were transfected by retrovirus in vitro and transplanted into an artery using a double-balloon catheter (Nabel et al., Science, 244 (4910): 1342-1344, 1989). Thus, it is contemplated that cells or tissues may be removed and transfected ex vivo using the polynucleotides presented herein. In particular aspects, the transplanted cells or tissues may be placed into an organism.

### Injection

[0377] In certain embodiments, an antigen presenting cell or a nucleic acid or viral vector may be delivered to an organelle, a cell, a tissue or an organism via one or more injections (i.e., a needle injection), such as, for example, subcutaneous, intradermal, intramuscular, intravenous, intraprotatic, intratumor, intraperitoneal, etc. Methods of injection include, for example, injection of a composition comprising a saline solution. Further embodiments include the introduction of a polynucleotide by direct microinjection. The amount of the expression vector used may vary upon the nature of the antigen as well as the organelle, cell, tissue or organism used. Intradermal, intranodal, or intralymphatic injections are some of the more commonly used methods of DC administration. Intradermal injection is characterized by a low rate of absorption into the bloodstream but rapid uptake into the lymphatic system. The presence of large numbers of Langerhans dendritic cells in the dermis will transport intact as well as processed antigen to draining lymph nodes. Proper site preparation is necessary to perform this correctly (i.e., hair is clipped in order to observe proper needle placement). Intranodal injection allows for direct delivery of antigen to lymphoid tissues. Intralymphatic injection allows direct administration of DCs.

### Electroporation

[0378] In certain embodiments, a polynucleotide is introduced into an organelle, a cell, a tissue or an organism via electroporation. Electroporation involves the exposure of a suspension of cells and DNA to a high-voltage electric discharge. In some variants of this method, certain cell wall-degrading enzymes, such as pectin-degrading enzymes, are employed to render the target recipient cells more susceptible to transformation by electroporation than untreated cells (U.S. Pat. No. 5,384,253, incorporated herein by reference).

[0379] Transfection of eukaryotic cells using electroporation has been quite successful. Mouse pre-B lymphocytes have been transfected with human kappa-immunoglobulin genes (Potter et al., (1984) Proc. Nat'l Acad. Sci. USA, 81, 7161-7165), and rat hepatocytes have been transfected with the chloramphenicol acetyltransferase gene (Tur-Kaspa et al., (1986) Mol. Cell Biol., 6, 716-718) in this manner.

[0380] In vivo electroporation for vaccines, or eVac, is clinically implemented through a simple injection technique. A DNA vector encoding a polypeptide is injected intradermally in a patient. Then electrodes apply electrical pulses to the intradermal space causing the cells localized there, especially resident dermal dendritic cells, to take up the DNA vector and express the encoded polypeptide. These polypeptide-expressing cells activated by local inflammation can then migrate to lymph-nodes, presenting antigens, for example. A nucleic acid is electrophoretically administered when it is administered using electroporation, following, for example, but not limited to, injection of the nucleic acid or any other means of administration where the nucleic acid may be delivered to the cells by electroporation

[0381] Methods of electroporation are discussed in, for example, Sardesai, N.Y., and Weiner, D. B., Current Opinion in Immunotherapy 23:421-9 (2011) and Ferraro, B. et al., Human Vaccines 7:120-127 (2011), which are hereby incorporated by reference herein in their entirety.

### Calcium Phosphate

[0382] In other embodiments, a polynucleotide is introduced to the cells using calcium phosphate precipitation. Human KB cells have been transfected with adenovirus 5 DNA (Graham and van der Eb, (1973) Virology, 52, 456-467) using this technique. Also in this manner, mouse L (A9), mouse C127, CHO, CV-1, BHK, NIH3T3 and Hela cells were transfected with a neomycin marker gene (Chen and Okayama, Mol. Cell Biol., 7 (8): 2745-2752, 1987), and rat hepatocytes were transfected with a variety of marker genes (Rippe et al., Mol. Cell Biol., 10:689-695, 1990).

### DEAE-Dextran

[0383] In another embodiment, a polynucleotide is delivered into a cell using DEAE-dextran followed by polyethylene glycol. In this manner, reporter plasmids were introduced into mouse myeloma and erythroleukemia cells (Gopal, T. V., Mol Cell Biol. 1985 May; 5 (5): 1188-90).

### Sonication Loading

[0384] Additional embodiments include the introduction of a polynucleotide by direct sonic loading. LTK-fibroblasts have been transfected with the thymidine kinase gene by sonication loading (Fechheimer et al., (1987) Proc. Nat'l Acad. Sci. USA, 84, 8463-8467).

### Liposome-Mediated Transfection

[0385] In a further embodiment, a polynucleotide may be entrapped in a lipid complex such as, for example, a liposome. Liposomes are vesicular structures characterized by a phospholipid bilayer membrane and an inner aqueous medium. Multilamellar liposomes have multiple lipid layers separated by aqueous medium. They form spontaneously when phospholipids are suspended in an excess of aqueous solution. The lipid components undergo self-rearrangement before the formation of closed structures and entrap water and dissolved solutes between the lipid bilayers (Ghosh and Bachhawat, (1991) In: Liver Diseases, Targeted Diagnosis and Therapy Using Specific Receptors and Ligands. pp. 87-104). Also contemplated is a polynucleotide complexed with Lipofectamine (Gibco BRL) or Superfect (Qiagen).

### Receptor Mediated Transfection

[0386] Still further, a polynucleotide may be delivered to a target cell via receptor-mediated delivery vehicles. These take advantage of the selective uptake of macromolecules by receptor-mediated endocytosis that will be occurring in a target cell. In view of the cell type-specific distribution of various receptors, this delivery method adds another degree of specificity.

[0387] Certain receptor-mediated gene targeting vehicles comprise a cell receptor-specific ligand and a polynucleotide-binding agent. Others comprise a cell receptor-specific ligand to which the polynucleotide to be delivered has been operatively attached. Several ligands have been used for receptor-mediated gene transfer (Wu and Wu, (1987) J. Biol. Chem., 262, 4429-4432; Wagner et al., Proc. Natl. Acad. Sci. USA, 87 (9): 3410-3414, 1990; Perales et al., Proc. Natl. Acad. Sci. USA, 91:4086-4090, 1994; Myers, EPO 0273085), which establishes the operability of the technique. Specific delivery in the context of another mammalian cell type has been discussed (Wu and Wu, Adv. Drug Delivery Rev., 12:159-167, 1993; incorporated herein by reference). In certain aspects, a ligand is chosen to correspond to a receptor specifically expressed on the target cell population. In other embodiments, a polynucleotide delivery vehicle component of a cell-specific polynucleotide-targeting vehicle may comprise a specific binding ligand in combination with a liposome. The polynucleotide(s) to be delivered are housed within the liposome and the specific binding ligand is functionally incorporated into the liposome membrane. The liposome will thus specifically bind to the receptor(s) of a target cell and deliver the contents to a cell. Such systems have been shown to be functional using systems in which, for example, epidermal growth factor (EGF) is used in the receptor-mediated delivery of a polynucleotide to cells that exhibit upregulation of the EGF receptor.

[0388] In still further embodiments, the polynucleotide delivery vehicle component of a targeted delivery vehicle may be a liposome itself, which may, for example, comprise one or more lipids or glycoproteins that direct cell-specific binding. For example, lactosyl-ceramide, a galactose-terminal asialoganglioside, have been incorporated into liposomes and observed an increase in the uptake of the insulin gene by hepatocytes (Nicolau et al., (1987) Methods Enzymol., 149, 157-176). It is contemplated that the tissue-specific transforming constructs may be specifically delivered into a target cell in a similar manner.

### Microprojectile Bombardment

[0389] Microprojectile bombardment techniques can be used to introduce a polynucleotide into at least one, organelle, cell, tissue or organism (U.S. Pat. Nos. 5,550,318; 5,538,880; 5,610,042; and PCT Application WO 94/09699; each of which is incorporated herein by reference). This method depends on the ability to accelerate DNA-coated microprojectiles to a high velocity allowing them to pierce cell membranes and enter cells without killing them (Klein et al., (1987) Nature, 327, 70-73). There are a wide variety of microprojectile bombardment techniques known in the art, many of which are applicable to the present methods. In this microprojectile bombardment, one or more particles may be coated with at least one polynucleotide and delivered into cells by a propelling force. Several devices for accelerating small particles have been developed. One such device relies on a high voltage discharge to generate an electrical current, which in turn provides the motive force (Yang et al., (1990) Proc. Nat'l Acad. Sci. USA, 87, 9568-9572). The microprojectiles used have consisted of biologically inert substances such as tungsten or gold particles or beads. Exemplary particles include those comprised of tungsten, platinum, and, in certain examples, gold, including, for example, nanoparticles. It is contemplated that in some instances DNA precipitation onto metal particles would not be necessary for DNA delivery to a recipient cell using microprojectile bombardment. However, it is contemplated that particles may contain DNA rather than be coated with DNA. DNA-coated particles may increase the level of DNA delivery via particle bombardment but are not, in and of themselves, necessary.

### Examples of Methods of Viral Vector-Mediated Transfer

[0390] Any viral vector suitable for administering nucleotide sequences, or compositions comprising nucleotide sequences, to a cell or to a subject, such that the cell or cells in the subject may express the genes encoded by the nucleotide sequences may be employed in the present methods. In certain embodiments, a transgene is incorporated into a viral particle to mediate gene transfer to a cell. Typically, the virus simply will be exposed to the appropriate host cell under physiologic conditions, permitting uptake of the virus. The present methods are advantageously employed using a variety of viral vectors, as discussed below.

### Adenovirus

[0391] Adenovirus is particularly suitable for use as a gene transfer vector because of its mid-sized DNA genome, ease of manipulation, high titer, wide target-cell range, and high infectivity. The roughly 36 kb viral genome is bounded by 100-200 base pair (bp) inverted terminal repeats (ITR), in which are contained cis-acting elements necessary for viral DNA replication and packaging. The early (E) and late (L) regions of the genome that contain different transcription units are divided by the onset of viral DNA replication.

[0392] The E1 region (E1A and E1B) encodes proteins responsible for the regulation of transcription of the viral genome and a few cellular genes. The expression of the E2 region (E2A and E2B) results in the synthesis of the proteins for viral DNA replication. These proteins are involved in DNA replication, late gene expression, and host cell shut off (Renan, M. J. (1990) Radiother Oncol., 19, 197-218). The products of the late genes (L1, L2, L3, L4 and L5), including the majority of the viral capsid proteins, are expressed only after significant processing of a single primary transcript issued by the major late promoter (MLP). The MLP (located at 16.8 map units) is particularly efficient during the late phase of infection, and all the mRNAs issued from this promoter possess a 5′ tripartite leader (TL) sequence, which makes them useful for translation.

[0393] In order for adenovirus to be optimized for gene therapy, it is necessary to maximize the carrying capacity so that large segments of DNA can be included. It also is very desirable to reduce the toxicity and immunologic reaction associated with certain adenoviral products. The two goals are, to an extent, coterminous in that elimination of adenoviral genes serves both ends. By practice of the present methods, it is possible to achieve both these goals while retaining the ability to manipulate the therapeutic constructs with relative ease.

[0394] The large displacement of DNA is possible because the cis elements required for viral DNA replication all are localized in the inverted terminal repeats (ITR) (100-200 bp) at either end of the linear viral genome. Plasmids containing ITR's can replicate in the presence of a non-defective adenovirus (Hay, R. T., et al., J Mol Biol. 1984 Jun. 5; 175 (4): 493-510). Therefore, inclusion of these elements in an adenoviral vector may permits replication.

[0395] In addition, the packaging signal for viral encapsulation is localized between 194-385 bp (0.5-1.1 map units) at the left end of the viral genome (Hearing et al., J. (1987) Virol., 67, 2555-2558). This signal mimics the protein recognition site in bacteriophage lambda DNA where a specific sequence close to the left end, but outside the cohesive end sequence, mediates the binding to proteins that are required for insertion of the DNA into the head structure. E1 substitution vectors of Ad have demonstrated that a 450 bp (0-1.25 map units) fragment at the left end of the viral genome could direct packaging in 293 cells (Levrero et al., Gene, 101:195-202, 1991).

[0396] Previously, it has been shown that certain regions of the adenoviral genome can be incorporated into the genome of mammalian cells and the genes encoded thereby expressed. These cell lines are capable of supporting the replication of an adenoviral vector that is deficient in the adenoviral function encoded by the cell line. There also have been reports of complementation of replication deficient adenoviral vectors by “helping” vectors, e.g., wild-type virus or conditionally defective mutants.

[0397] Replication-deficient adenoviral vectors can be complemented, in trans, by helper virus. This observation alone does not permit isolation of the replication-deficient vectors, however, since the presence of helper virus, needed to provide replicative functions, would contaminate any preparation. Thus, an additional element was needed that would add specificity to the replication and/or packaging of the replication-deficient vector. That element derives from the packaging function of adenovirus. It has been shown that a packaging signal for adenovirus exists in the left end of the conventional adenovirus map (Tibbetts et. al. (1977) Cell, 12, 243-249). Later studies showed that a mutant with a deletion in the E1A (194-358 bp) region of the genome grew poorly even in a cell line that complemented the early (E1A) function (Hearing and Shenk, (1983) J. Mol. Biol. 167, 809-822). When a compensating adenoviral DNA (0-353 bp) was recombined into the right end of the mutant, the virus was packaged normally. Further mutational analysis identified a short, repeated, position-dependent element in the left end of the Ad5 genome. One copy of the repeat was found to be sufficient for efficient packaging if present at either end of the genome, but not when moved toward the interior of the Ad5 DNA molecule (Hearing et al., J. (1987) Virol., 67, 2555-2558).

[0398] By using mutated versions of the packaging signal, it is possible to create helper viruses that are packaged with varying efficiencies. Typically, the mutations are point mutations or deletions. When helper viruses with low efficiency packaging are grown in helper cells, the virus is packaged, albeit at reduced rates compared to wild-type virus, thereby permitting propagation of the helper. When these helper viruses are grown in cells along with virus that contains wild-type packaging signals, however, the wild-type packaging signals are recognized preferentially over the mutated versions. Given a limiting amount of packaging factor, the virus containing the wild-type signals is packaged selectively when compared to the helpers. If the preference is great enough, stocks approaching homogeneity may be achieved.

[0399] To improve the tropism of ADV constructs for particular tissues or species, the receptor-binding fiber sequences can often be substituted between adenoviral isolates. For example the Coxsackie-adenovirus receptor (CAR) ligand found in adenovirus 5 can be substituted for the CD46-binding fiber sequence from adenovirus 35, making a virus with greatly improved binding affinity for human hematopoietic cells. The resulting “pseudotyped” virus, Ad5f35, has been the basis for several clinically developed viral isolates. Moreover, various biochemical methods exist to modify the fiber to allow re-targeting of the virus to target cells. Methods include use of bifunctional antibodies (with one end binding the CAR ligand and one end binding the target sequence), and metabolic biotinylation of the fiber to permit association with customized avidin-based chimeric ligands. Alternatively, one could attach ligands (e.g. anti-CD205 by heterobifunctional linkers (e.g. PEG-containing), to the adenovirus particle.

### Retrovirus

[0400] The retroviruses are a group of single-stranded RNA viruses characterized by an ability to convert their RNA to double-stranded DNA in infected cells by a process of reverse-transcription (Coffin, (1990) In: Virology, ed., New York: Raven Press, pp. 1437-1500). The resulting DNA then stably integrates into cellular chromosomes as a provirus and directs synthesis of viral proteins. The integration results in the retention of the viral gene sequences in the recipient cell and its descendants. The retroviral genome contains three genes—gag, pol and env—that code for capsid proteins, polymerase enzyme, and envelope components, respectively. A sequence found upstream from the gag gene, termed psi, functions as a signal for packaging of the genome into virions. Two long terminal repeat (LTR) sequences are present at the 5′ and 3′ ends of the viral genome. These contain strong promoter and enhancer sequences and also are required for integration in the host cell genome (Coffin, 1990). Thus, for example, the present technology includes, for example, cells whereby the polynucleotide used to transduce the cell is integrated into the genome of the cell. In order to construct a retroviral vector, a nucleic acid encoding a promoter is inserted into the viral genome in the place of certain viral sequences to produce a virus that is replication-defective. In order to produce virions, a packaging cell line containing the gag, pol and env genes but without the LTR and psi components is constructed (Mann et al., (1983) Cell, 33, 153-159). When a recombinant plasmid containing a human cDNA, together with the retroviral LTR and psi sequences is introduced into this cell line (by calcium phosphate precipitation for example), the psi sequence allows the RNA transcript of the recombinant plasmid to be packaged into viral particles, which are then secreted into the culture media (Nicolas, J. F., and Rubenstein, J. L. R., (1988) In: Vectors: a Survey of Molecular Cloning Vectors and Their Uses, Rodriquez and Denhardt, Eds.). Nicolas and Rubenstein; Temin et al., (1986) In: Gene Transfer, Kucherlapati (ed.), and New York: Plenum Press, pp. 149-188; Mann et al., 1983). The media containing the recombinant retroviruses is collected, optionally concentrated, and used for gene transfer. Retroviral vectors are able to infect a broad variety of cell types. However, integration and stable expression of many types of retroviruses require the division of host cells (Paskind et al., (1975) Virology, 67, 242-248). An approach designed to allow specific targeting of retrovirus vectors recently was developed based on the chemical modification of a retrovirus by the chemical addition of galactose residues to the viral envelope. This modification could permit the specific infection of cells such as hepatocytes via asialoglycoprotein receptors, may be desired. A different approach to targeting of recombinant retroviruses was designed, which used biotinylated antibodies against a retroviral envelope protein and against a specific cell receptor. The antibodies were coupled via the biotin components by using streptavidin (Roux et al., (1989) Proc. Nat'l Acad. Sci. USA, 86, 9079-9083). Using antibodies against major histocompatibility complex class I and class II antigens, the infection of a variety of human cells that bore those surface antigens was demonstrated with an ecotropic virus in vitro (Roux et al., 1989).

### Adeno-Associated Virus

[0401] AAV utilizes a linear, single-stranded DNA of about 4700 base pairs. Inverted terminal repeats flank the genome. Two genes are present within the genome, giving rise to a number of distinct gene products. The first, the cap gene, produces three different virion proteins (VP), designated VP-1, VP-2 and VP-3. The second, the rep gene, encodes four non-structural proteins (NS). One or more of these rep gene products is responsible for transactivating AAV transcription. The three promoters in AAV are designated by their location, in map units, in the genome. These are, from left to right, p5, p19 and p40. Transcription gives rise to six transcripts, two initiated at each of three promoters, with one of each pair being spliced. The splice site, derived from map units 42-46, is the same for each transcript. The four non-structural proteins apparently are derived from the longer of the transcripts, and three virion proteins all arise from the smallest transcript.

[0402] AAV is not associated with any pathologic state in humans. Interestingly, for efficient replication, AAV requires “helping” functions from viruses such as herpes simplex virus I and II, cytomegalovirus, pseudorabies virus and, of course, adenovirus. The best characterized of the helpers is adenovirus, and many “early” functions for this virus have been shown to assist with AAV replication. Low-level expression of AAV rep proteins believed to hold AAV structural expression in check, and helper virus infection is thought to remove this block. The terminal repeats of the AAV vector can be obtained by restriction endonuclease digestion of AAV or a plasmid such as p201, which contains a modified AAV genome (Samulski et al., J. Virol., 61:3096-3101 (1987)), or by other methods, including but not limited to chemical or enzymatic synthesis of the terminal repeats based upon the published sequence of AAV. It can be determined, for example, by deletion analysis, the minimum sequence or part of the AAV ITRs which is required to allow function, i.e., stable and site-specific integration. It can also be determined which minor modifications of the sequence can be tolerated while maintaining the ability of the terminal repeats to direct stable, site-specific integration.

[0403] AAV-based vectors have proven to be safe and effective vehicles for gene delivery in vitro, and these vectors are being developed and tested in pre-clinical and clinical stages for a wide range of applications in potential gene therapy, both ex vivo and in vivo (Carter and Flotte, (1995) Ann. N.Y. Acad. Sci., 770; 79-90; Chatteijee, et al., (1995) Ann. N.Y. Acad. Sci., 770, 79-90; Ferrari et al., (1996) J. Virol., 70, 3227-3234; Fisher et al., (1996) J. Virol., 70, 520-532; Flotte et al., Proc. Nat'l Acad. Sci. USA, 90, 10613-10617, (1993); Goodman et al. (1994), Blood, 84, 1492-1500; Kaplitt et al., (1994) Nat'l Genet., 8, 148-153; Kaplitt, M. G., et al., Ann Thorac Surg. 1996 December; 62 (6): 1669-76; Kessler et al., (1996) Proc. Nat'l Acad. Sci. USA, 93, 14082-14087; Koeberl et al., (1997) Proc. Nat'l Acad. Sci. USA, 94, 1426-1431; Mizukami et al., (1996) Virology, 217, 124-130).

[0404] AAV-mediated efficient gene transfer and expression in the lung has led to clinical trials for the treatment of cystic fibrosis (Carter and Flotte, 1995; Flotte et al., Proc. Nat'l Acad. Sci. USA, 90, 10613-10617, (1993)). Similarly, the prospects for treatment of muscular dystrophy by AAV-mediated gene delivery of the dystrophin gene to skeletal muscle, of Parkinson's disease by tyrosine hydroxylase gene delivery to the brain, of hemophilia B by Factor IX gene delivery to the liver, and potentially of myocardial infarction by vascular endothelial growth factor gene to the heart, appear promising since AAV-mediated transgene expression in these organs has recently been shown to be highly efficient (Fisher et al., (1996) J. Virol., 70, 520-532; Flotte et al., 1993; Kaplitt et al., 1994; 1996; Koeberl et al., 1997; Mccown et al., (1996) Brain Res., 713, 99-107; Ping et al., (1996) Microcirculation, 3, 225-228; Xiao et al., (1996) J. Virol., 70, 8098-8108).

### Other Viral Vectors

[0405] Other viral vectors are employed as expression constructs in the present methods and compositions. Vectors derived from viruses such as vaccinia virus (Ridgeway, (1988) In: Vectors: A survey of molecular cloning vectors and their uses, pp. 467-492; Baichwal and Sugden, (1986) In, Gene Transfer, pp. 117-148; Coupar et al., Gene, 68:1-10, 1988) canary poxvirus, and herpes viruses are employed. These viruses offer several features for use in gene transfer into various mammalian cells.

[0406] Once the construct has been delivered into the cell, the nucleic acid encoding the transgene are positioned and expressed at different sites. In certain embodiments, the nucleic acid encoding the transgene is stably integrated into the genome of the cell. This integration is in the cognate location and orientation via homologous recombination (gene replacement) or it is integrated in a random, non-specific location (gene augmentation). In yet further embodiments, the nucleic acid is stably maintained in the cell as a separate, episomal segment of DNA. Such nucleic acid segments or “episomes” encode sequences sufficient to permit maintenance and replication independent of or in synchronization with the host cell cycle. How the expression construct is delivered to a cell and where in the cell the nucleic acid remains is dependent on the type of expression construct employed.

### Methods for Treating a Disease

[0407] The present methods also encompass methods of treatment or prevention of a disease where administration of cells by, for example, infusion, may be beneficial.

[0408] Cells, such as, for example, T cells, tumor infiltrating lymphocytes, natural killer cells, natural killer T cells, or progenitor cells, such as, for example, hematopoietic stem cells, mesenchymal stromal cells, stem cells, pluripotent stem cells, and embryonic stem cells may be used for cell therapy. The cells may be from a donor, or may be cells obtained from the patient. The cells may, for example, be used in regeneration, for example, to replace the function of diseased cells. The cells may also be modified to express a heterologous gene so that biological agents may be delivered to specific microenvironments such as, for example, diseased bone marrow or metastatic deposits. Mesenchymal stromal cells have also, for example, been used to provide immunosuppressive activity, and may be used in the treatment of graft versus host disease and autoimmune disorders. The cells provided in the present application contain a safety switch that may be valuable in a situation where following cell therapy, the activity of the therapeutic cells needs to be increased, or decreased. For example, where T cells that express a chimeric antigen receptor are provided to the patient, in some situations there may be an adverse event, such as off-target toxicity. Ceasing the administration of the ligand would return the therapeutic T cells to a non-activated state, remaining at a low, non-toxic, level of expression. Or, for example, the therapeutic cell may work to decrease the tumor cell, or tumor size, and may no longer be needed. In this situation, administration of the ligand may cease, and the therapeutic cells would no longer be activated. If the tumor cells return, or the tumor size increases following the initial therapy, the ligand may be administered again, in order to activate the chimeric antigen receptor-expressing T cells, and re-treat the patient.

[0409] By “therapeutic cell” is meant a cell used for cell therapy, that is, a cell administered to a subject to treat or prevent a condition or disease. In such cases, where the cells have a negative effect, the present methods may be used to remove the therapeutic cells through selective apoptosis.

[0410] In other examples, T cells are used to treat various diseases and conditions, and as a part of stem cell transplantation. An adverse event that may occur after haploidentical T cell transplantation is graft versus host disease (GvHD). The likelihood of GvHD occurring increases with the increased number of T cells that are transplanted. This limits the number of T cells that may be infused. By having the ability to selectively remove the infused T cells in the event of GvHD in the patient, a greater number of T cells may be infused, increasing the number to greater than 10⁶, greater than 10⁷, greater than 10⁸, or greater than 10⁹ cells. The number of T cells/kg body weight that may be administered may be, for example, from about 1×10⁴ T cells/kg body weight to about 9×10⁷ T cells/kg body weight, for example about 1, 2, 3, 4, 5, 6, 7, 8, or 9×10⁴; about 1, 2, 3, 4, 5, 6, 7, 8, or 9×10⁵; about 1, 2, 3, 4, 5, 6, 7, 8, or 9×10⁶; or about 1, 2, 3, 4, 5, 6, 7, 8, or 9×10⁷ T cells/kg body weight. In other examples, therapeutic cells other than T cells may be used. The number of therapeutic cells/kg body weight that may be administered may be, for example, from about 1×10⁴ T cells/kg body weight to about 9×10⁷ T cells/kg body weight, for example about 1, 2, 3, 4, 5, 6, 7, 8, or 9×10⁴; about 1, 2, 3, 4, 5, 6, 7, 8, or 9×10⁵; about 1, 2, 3, 4, 5, 6, 7, 8, or 9×10⁶; or about 1, 2, 3, 4, 5, 6, 7, 8, or 9×10⁷ therapeutic cells/kg body weight.

[0411] The term “unit dose” as it pertains to the inoculum refers to physically discrete units suitable as unitary dosages for mammals, each unit containing a predetermined quantity of pharmaceutical composition calculated to produce the desired immunogenic effect in association with the required diluent. The specifications for the unit dose of an inoculum are dictated by and are dependent upon the unique characteristics of the pharmaceutical composition and the particular immunologic effect to be achieved.

[0412] An effective amount of the pharmaceutical composition, such as the multimeric ligand presented herein, would be the amount that achieves this selected result of selectively removing the cells that include the Caspase-9 vector, such that over 60%, 70%, 80%, 85%, 90%, 95%, or 97% of the Caspase-9 expressing cells are killed. The term is also synonymous with “sufficient amount.” The effective amount for any particular application can vary depending on such factors as the disease or condition being treated, the particular composition being administered, the size of the subject, and/or the severity of the disease or condition. One can empirically determine the effective amount of a particular composition presented herein without necessitating undue experimentation.

[0413] The terms “contacted” and “exposed,” when applied to a cell, tissue or organism, are used herein to discuss the process by which the pharmaceutical composition and/or another agent, such as for example a chemotherapeutic or radiotherapeutic agent, are delivered to a target cell, tissue or organism or are placed in direct juxtaposition with the target cell, tissue or organism. To achieve cell killing or stasis, the pharmaceutical composition and/or additional agent(s) are delivered to one or more cells in a combined amount effective to kill the cell(s) or prevent them from dividing. The administration of the pharmaceutical composition may precede, be co-current with and/or follow the other agent(s) by intervals ranging from minutes to weeks. In embodiments where the pharmaceutical composition and other agent(s) are applied separately to a cell, tissue or organism, one would generally ensure that a significant period of time did not expire between the times of each delivery, such that the pharmaceutical composition and agent(s) would still be able to exert an advantageously combined effect on the cell, tissue or organism. For example, in such instances, it is contemplated that one may contact the cell, tissue or organism with two, three, four or more modalities substantially simultaneously (i.e., within less than about a minute) with the pharmaceutical composition. In other aspects, one or more agents may be administered within of from substantially simultaneously, about 1 minute, to about 24 hours to about 7 days to about 1 to about 8 weeks or more, and any range derivable therein, prior to and/or after administering the expression vector. Yet further, various combination regimens of the pharmaceutical composition presented herein and one or more agents may be employed.

### Optimized and Personalized Therapeutic Treatment

[0414] The induction of apoptosis after administration of the dimer may be optimized by determining the stage of graft versus host disease, or the number of undesired therapeutic cells that remain in the patient.

[0415] For example, determining that a patient has GvHD, and the stage of the GvHD, provides an indication to a clinician that it may be necessary to induce Caspase-9 associated apoptosis by administering the multimeric ligand. In another example, determining that a patient has a reduced level of GvHD after treatment with the multimeric ligand may indicate to the clinician that no additional dose of the multimeric ligand is needed. Similarly, after treatment with the multimeric ligand, determining that the patient continues to exhibit GvHD symptoms, or suffers a relapse of GvHD may indicate to the clinician that it may be necessary to administer at least one additional dose of multimeric ligand. The term “dosage” is meant to include both the amount of the dose and the frequency of administration, such as, for example, the timing of the next dose.

[0416] In other embodiments, following administration of therapeutic cells, for example, therapeutic cells which express a chimeric antigen receptor in addition to the inducible Caspase-9 polypeptide, in the event of a need to reduce the number of modified cells or in vivo modified cells, the multimeric ligand may be administered to the patient. In these embodiments, the methods comprise determining the presence or absence of a negative symptom or condition, such as Graft vs Host Disease, or off target toxicity, and administering a dose of the multimeric ligand. The methods may further comprise monitoring the symptom or condition and administering an additional dose of the multimeric ligand in the event the symptom or condition persists. This monitoring and treatment schedule may continue while the therapeutic cells that express chimeric antigen receptors or chimeric signaling molecules remain in the patient.

[0417] An indication of adjusting or maintaining a subsequent drug dose, such as, for example, a subsequence dose of the multimeric ligand, and/or the subsequent drug dosage, can be provided in any convenient manner. An indication may be provided in tabular form (e.g., in a physical or electronic medium) in some embodiments. For example, the graft versus host disease observed symptoms may be provided in a table, and a clinician may compare the symptoms with a list or table of stages of the disease. The clinician then can identify from the table an indication for subsequent drug dose. In certain embodiments, an indication can be presented (e.g., displayed) by a computer, after the symptoms or the GvHD stage is provided to the computer (e.g., entered into memory on the computer). For example, this information can be provided to a computer (e.g., entered into computer memory by a user or transmitted to a computer via a remote device in a computer network), and software in the computer can generate an indication for adjusting or maintaining a subsequent drug dose, and/or provide the subsequent drug dose amount.

[0418] Once a subsequent dose is determined based on the indication, a clinician may administer the subsequent dose or provide instructions to adjust the dose to another person or entity. The term “clinician” as used herein refers to a decision maker, and a clinician is a medical professional in certain embodiments. A decision maker can be a computer or a displayed computer program output in some embodiments, and a health service provider may act on the indication or subsequent drug dose displayed by the computer. A decision maker may administer the subsequent dose directly (e.g., infuse the subsequent dose into the subject) or remotely (e.g., pump parameters may be changed remotely by a decision maker).

[0419] In some examples, a dose, or multiple doses of the ligand may be administered before clinical manifestations of GvHD, or other symptoms, such as CRS symptoms, are apparent. In this example, cell therapy is terminated before the appearance of negative symptoms. In other embodiments, such as, for example, hematopoietic cell transplant for the treatment of a genetic disease, the therapy may be terminated after the transplant has made progress toward engraftment, but before clinically observable GvHD, or other negative symptoms, can occur. In other examples, the ligand may be administered to eliminate the modified cells in order to eliminate on target/off-tumor cells, such as, for example, healthy B cells co-expressing the B cell-associated target antigen.

[0420] Methods as presented herein include without limitation the delivery of an effective amount of an activated cell, a nucleic acid or an expression construct encoding the same. An “effective amount” of the pharmaceutical composition, generally, is defined as that amount sufficient to detectably and repeatedly to achieve the stated desired result, for example, to ameliorate, reduce, minimize or limit the extent of the disease or its symptoms. Other more rigorous definitions may apply, including elimination, eradication or cure of disease. In some embodiments there may be a step of monitoring the biomarkers to evaluate the effectiveness of treatment and to control toxicity.

### Dual Control of Therapeutic Cells and Heterdimerizer Control of Apoptosis for Controlled Therapy

[0421] Nucleic acids and cells provided herein may be used to achieve dual control of therapeutic cells for controlled therapy. For example, the subject may be diagnosed with a condition, such as a tumor, where there is a need to deliver targeted chimeric antigen receptor therapy. Methods discussed herein provide several examples of ways to control therapy in order to induce activity of the CAR-expressing therapeutic cells, and also to provide a safety switch should there be a need to discontinue therapy completely, or to reduce the number or percent of the therapeutic cells in the subject.

[0422] In certain examples, modified T cells are administered to a subject that express the following polypeptides: 1. A chimeric polypeptide (iMyD88/CD40, or “iMC”) that comprises two or more FKBP12 ligand binding regions and a costimulatory polypeptide or polypeptides, such as, for example, MyD88 or truncated MyD88 and CD40; 2. A chimeric proapoptotic polypeptide that comprises one or more FRB ligand binding regions and a Caspase-9 polypeptide; 3. A chimeric antigen receptor polypeptide comprising an antigen recognition moiety that binds to a target antigen. In this example, the target antigen is a tumor antigen present on tumor cells in the subject. Following administration, the ligand AP1903 may be administered to the subject, which induces iMC activation of the CAR-T cell. The therapy is monitored, for example, the tumor size or growth may be assessed during the course of therapy. One or more doses of the ligand may be administered during the course of therapy.

[0423] Therapy may be modulated by discontinuing administration of AP1903, which may lower the activation level of the CAR-T cell. To discontinue CAR-T cell therapy, the safety switch-chimeric Caspase-9 polypeptide may be activated by administering a rapalog, which binds to the FRB ligand binding region. The amount and dosing schedule of the rapalog may be determined based on the level of CAR-T cell therapy that is needed. As a safety switch, the dose of the rapalog is an amount effective to remove at least 90%, 95%, 97%, 98%, or 99% of the administered modified cells. In other examples, the dose is an amount effective to remove up to 30%, 40%, 50%, 60%, 70%, 80%, 90, 95%, or 100% of the cells that express the chimeric caspase polypeptide, if there is a need to reduce the level of CAR-T cell therapy, but not completely stop the therapy. This may be measured, for example, by obtaining a sample from the subject before inducing the safety switch, before administering the rapamycin or rapalog, and obtaining a sample following administration of the rapamycin or rapalog, at, for example 0.5, 1, 2, 3, 4, 5, 6, 7, 8, 9, 10 hours, or 1, 2, 3, 4, 5 days following administration, and comparing the number or concentration of chimeric caspase-expressing cells between the two samples by, for example, any method available, including, for example, detecting the presence of a marker. This method of determining percent removal of the cells may also be used where the inducing ligand is AP1903 or binds to the FKBP12 or FKBP12 variant multimerizing region.

[0424] In some examples, the inducible MyD88/CD40 chimeric polypeptide also comprises the chimeric antigen receptor. In these examples, where the two polypeptides are present on the same molecule, the chimeric polypeptide may comprise one or more ligand binding regions.

[0425] Chemical Induction of protein Dimerization (CID) has been effectively applied to make cellular suicide or apoptosis inducible with the small molecule homodimerizing ligand, rimiducid (AP1903). This technology underlies the “safety switch” incorporated as a gene therapy adjunct in cell transplants (1, 2). The central tenet of the technology is that normal cellular regulatory pathways that rely on protein-protein interaction as part of a signaling pathway can be adapted to ligand-dependent, conditional control if a small molecule dimerizing drug is used to control the protein-protein oligomerization event (3-5). Induced dimerization of a fusion protein comprising Caspase-9 and FKBP12 or an FKBP12 variant (i.e., “iCaspase9/iCasp9/iC9) using a homodimerizing ligand, such as rimiducid, AP1510 or AP20187, can rapidly effect cell death. Caspase-9 is an initiating caspase that acts as a “gate-keeper” of the apoptotic process (6). Normally, pro-apoptotic molecules (e.g., cytochrome c) released from the mitochondria of apoptotic cells alter the conformation of Apaf-1, a caspase-9-binding scaffold, leading to its oligomerization and formation of the “apoptosome”. This alteration facilitates caspase-9 dimerization and cleavage of its latent form into an active molecule that, in turn, cleaves the “downstream” apoptosis effector, caspase-3, leading to irreversible cell death. Rimiducid binds directly with two FKBP12-V36 moieties and can direct the dimerization of fusion proteins that include FKBP12-V36 (1, 2). iC9 engagement with rimiducid circumvents the need for Apaf1 conversion to the active apoptosome. In this example, the fusion of caspase-9 to protein moieties that engage a heterodimerizing ligand is assayed for its ability to direct its activation and cell death with similar efficacy to rimiducid-mediated iC9 activation.

[0426] MyD88 and CD40 were chosen as the basis of the iMC activation switch. MyD88 plays a central signaling role in the detection of pathogens or cell injury by antigen-presenting cells (APCs), like dendritic cells (DCs). Following exposure to pathogen- or necrotic cells-derived “danger” molecules”, a subclass of “pattern recognition receptors”, called Toll-Like Receptors (TLRs) are activated, leading to the aggregation and activation of adapter molecule, MyD88, via homologous TLR-IL1RA (TIR) domains on both proteins. MyD88, in turn, activates downstream signaling, via the rest of the protein. This leads to the upregulation of costimulatory proteins, like CD40, and other proteins, like MHC and proteases, needed for antigen processing and presentation. The fusion of signaling domains from MyD88 and CD40 with two Fᵥ domains, provides iMC (also MC.FvFv), which potently activated DCs following exposure to rimiducid (7). It was later found that iMC is a potent costimulatory protein for T cells, as well.

[0427] Rapamycin is a natural product macrolide that binds with high affinity (<1 nM) to FKBP12 and together initiates the high-affinity, inhibitory interaction with the FKBP-Rapamycin-Binding (FRB) domain of mTOR (8). FRB is small (89 amino acids) and can thereby be used as a protein “tag” or “handle” when appended to many proteins (9-11). Coexpression of a FRB-fused protein with a FKBP12-fused protein renders their approximation rapamycin-inducible (12-16). This and the examples that follow provide experiments and results designed to test whether expression of Caspase-9 bound with FKBP and FRB in tandem can also direct apoptosis and serve as the basis for a cell safety switch regulated by the orally available ligand, rapamycin. Further, an inducible MyD88/CD40 rapamycin-sensitive costimulatory polypeptide was developed by fusing FKBP and FRB in tandem with the MyD88/CD40 polypeptide. For this tandem fusion of FKBP and FRB, derivatives of rapamycin (rapalogs) may also be used that do not inhibit mTOR at a low, therapeutic dose. For example, rapamycin, or these rapamycin analogs may bind with selected, MC-FKBP-fused mutant FRB domains, using a heterdimerizer to homodimerize two MC-FKBP-FRB polypeptides.

[0428] The following references are referred to in this section, and are hereby incorporated by reference herein in their entireties.
[0429] 1. Straathof K C, Pule M A, Yotnda P, Dotti G, Vanin E F, Brenner M K, Heslop H E, Spencer D M, and Rooney C M. An inducible caspase 9 safety switch for T-cell therapy. Blood. 2005; 105 (11): 4247-54.
[0430] 2. Fan L, Freeman K W, Khan T, Pham E, and Spencer D M. Improved artificial death switches based on caspases and FADD. Hum Gene Ther. 1999; 10 (14): 2273-85.
[0431] 3. Spencer D M, Wandless T J, Schreiber S L, and Crabtree G R. Controlling signal transduction with synthetic ligands. Science. 1993; 262 (5136): 1019-24.
[0432] 4. Acevedo V D, Gangula R D, Freeman K W, Li R, Zhang Y, Wang F, Ayala G E, Peterson L E, Ittmann M, and Spencer D M. Inducible FGFR-1 activation leads to irreversible prostate adenocarcinoma and an epithelial-to-mesenchymal transition. Cancer Cell. 2007; 12 (6): 559-71.
[0433] 5. Spencer D M, Belshaw P J, Chen L, Ho S N, Randazzo F, Crabtree G R, and Schreiber S L. Functional analysis of Fas signaling in vivo using synthetic inducers of dimerization. Curr Biol. 1996; 6 (7): 839-47.
[0434] 6. Strasser A, Cory S, and Adams J M. Deciphering the rules of programmed cell death to improve therapy of cancer and other diseases. EMBO J. 2011; 30 (18): 3667-83.
[0435] 7. Narayanan P, Lapteva N, Seethammagari M, Levitt J M, Slawin K M, and Spencer D M. A composite MyD88/CD40 switch synergistically activates mouse and human dendritic cells for enhanced antitumor efficacy. J Clin Invest. 2011; 121 (4): 1524-34.
[0436] 8. Sabatini D M, Erdjument-Bromage H, Lui M, Tempst P, and Snyder S H. RAFT1: a mammalian protein that binds to FKBP12 in a rapamycin-dependent fashion and is homologous to yeast TORs. Cell. 1994; 78 (1): 35-43.
[0437] 9. Brown E J, Albers M W, Shin T B, Ichikawa K, Keith C T, Lane W S, and Schreiber S L. A mammalian protein targeted by G1-arresting rapamycin-receptor complex. Nature. 1994; 369 (6483): 756-8.
[0438] 10. Chen J, Zheng X F, Brown E J, and Schreiber S L. Identification of an 11-kDa FKBP12-rapamycin-binding domain within the 289-kDa FKBP12-rapamycin-associated protein and characterization of a critical serine residue. Proc Natl Acad Sci USA. 1995; 92 (11): 4947-51.
[0439] 11. Choi J, Chen J, Schreiber S L, and Clardy J. Structure of the FKBP12-rapamycin complex interacting with the binding domain of human FRAP. Science. 1996; 273 (5272): 239-42.
[0440] 12. Ho S N, Biggar S R, Spencer D M, Schreiber S L, and Crabtree G R. Dimeric ligands define a role for transcriptional activation domains in reinitiation. Nature. 1996; 382 (6594): 822-6.
[0441] 13. Klemm J D, Beals C R, and Crabtree G R. Rapid targeting of nuclear proteins to the cytoplasm. Curr Biol. 1997; 7 (9): 638-44.
[0442] 14. Bayle J H, Grimley J S, Stankunas K, Gestwicki J E, Wandless T J, and Crabtree G R. Rapamycin analogs with differential binding specificity permit orthogonal control of protein activity. Chem Biol. 2006; 13 (1): 99-107.
[0443] 15. Stankunas K, Bayle J H, Gestwicki J E, Lin Y M, Wandless T J, and Crabtree G R. Conditional protein alleles using knockin mice and a chemical inducer of dimerization. Mol Cell. 2003; 12 (6): 1615-24.
[0444] 16. Stankunas K, Bayle J H, Havranek J J, Wandless T J, Baker D, Crabtree G R, and Gestwicki J E. Rescue of Degradation-Prone Mutants of the FK506-Rapamycin Binding (FRB) Protein with Chemical Ligands. Chembiochem. 2007.

### Dual-Switch, Chimeric Pro-Apoptotic Polypeptides

[0445] The activity of chimeric polypeptides FRB.FKBPᵥ.ΔC9 (dual-control), FKBPᵥ.ΔC9, and or FRB.FKBP.ΔC9 were assayed in response to either the heterodimer, rapamycin, or the homodimer, rimiducid.

[0446] Chemical Induction of Dimerization (CID) with small molecules is an effective technology used to generate switches of protein function to alter cell physiology. Rimiducid or AP1903 is a highly specific and efficient dimerizer composed of two identical protein-binding surfaces (based on FK506) arranged tail-to-tail, each with high affinity and specificity for an FKBP mutant, FKBP12v36 or FKBPᵥ. FKBP12v36 is a modified version of FKBP12, in which phenylalanine 36, is replaced with the smaller hydrophobic residue, valine, which accommodates the bulky modification on the FKBP12-binding site of AP1903 [1]. This change increases binding of AP1903 to FKBP12v36 (˜ 0.1 nM), while binding of AP1903 to native FKBP12 is reduced around 100-fold relative to FK506 [1, 2]. Attachment of one or more Fᵥ domains onto one or more cell signaling molecules that normally rely on homodimerization can convert that protein to rimiducid-induced signaling control. Homodimerization with rimiducid is the basis of both the inducible Caspase-9 (iCaspase-9) “safety switch” and the inducible MyD88/CD40 (IMC) “activation switch” for cellular therapy.

[0447] Rapamycin binds to FKBP12, but unlike rimiducid, rapamycin also binds to the FKBP12-Rapamycin-Binding (FRB) domain of mTOR and can induce heterodimerization of signaling domains that are fused to FKBP12 with fusions containing FRB. Expression of Caspase-9 fused with FKBP and FRB in tandem (in both orientations: FKBP.FRB.ΔC9 or FRB.FKBP.ΔC9) can direct apoptosis and serve as the basis for a cell safety switch regulated by the orally available ligand, rapamycin. Importantly, since rimiducid contains a bulky modification on the FKBP12-binding site, this dimerizer is not able to bind to wild type FKBP12.

[0448] The FRB.FKBPᵥ.ΔC9 switch provides the option to activate caspase-9 with either rimiducid or rapamycin by mutating the FKBP domain to FKBPv. This flexibility in terms of choice of activating drug may be important in a clinical setting where the clinician can choose to administer the drug based on its specific pharmacological properties. Additionally, this switch provides a molecule to allow for direct comparison between the drug-activating kinetics of rimiducid and rapamycin where the effector is contained within a single molecule.
[0449] 1. D. Spencer, et al., Science, vol. 262, pp. 1019-1024, 1993.
[0450] 2. T. Clackson, et al., Proc natl Acad Sci USA, vol. 95, pp. 10437-10442, 1998.

### Formulations and Routes for Administration to Patients

[0451] Where clinical applications are contemplated, it will be necessary to prepare pharmaceutical compositions-expression constructs, expression vectors, fused proteins, transfected or transduced cells, in a form appropriate for the intended application. Generally, this will entail preparing compositions that are essentially free of pyrogens, as well as other impurities that could be harmful to humans or animals. The multimeric ligand, such as, for example, AP1903 (INN rimiducid, may be delivered, for example at doses of about 0.1 to 10 mg/kg subject weight, of about 0.1 to 5 mg/kg subject weight, of about 0.2 to 4 mg/kg subject weight, of about 0.3 to 3 mg/kg subject weight, of about 0.3 to 2 mg/kg subject weight, or about 0.3 to 1 mg/kg subject weight, for example, about 0.1, 0.2, 0.3, 0.4, 0.5, 0.6, 0.7, 0.8, 0.9, 1.0, 1.5, 2, 2.5, 3, 3.5, 4, 4.5, 5, 6, 7, 8, 9, or 10 mg/kg subject weight. In some embodiments, the ligand is provided at 0.4 mg/kg per dose, for example at a concentration of 5 mg/mL. Vials or other containers may be provided containing the ligand at, for example, a volume per vial of about 0.25 ml to about 10 ml, for example, about 0.25, 0.5, 1, 1.5, 2, 2.5, 3, 3.5, 4, 4.5, 5, 5.5, 6, 6.5, 7, 7.5, 8, 8.5, 9, 9.5, or 10 ml, for example, about 2 ml.

[0452] One may generally desire to employ appropriate salts and buffers to render delivery vectors stable and allow for uptake by target cells. Buffers also may be employed when recombinant cells are introduced into a patient. Aqueous compositions comprise an effective amount of the vector to cells, dissolved or dispersed in a pharmaceutically acceptable carrier or aqueous medium. Such compositions also are referred to as inocula. A pharmaceutically acceptable carrier includes any and all solvents, dispersion media, coatings, antibacterial and antifungal agents, isotonic and absorption delaying agents and the like. The use of such media and agents for pharmaceutically active substances is known. Except insofar as any conventional media or agent is incompatible with the vectors or cells, its use in therapeutic compositions is contemplated. Supplementary active ingredients also can be incorporated into the compositions.

[0453] The active compositions may include classic pharmaceutical preparations. Administration of these compositions will be via any common route so long as the target tissue is available via that route. This includes, for example, oral, nasal, buccal, rectal, vaginal or topical. Alternatively, administration may be by orthotopic, intradermal, subcutaneous, intramuscular, intraperitoneal or intravenous injection. Such compositions would normally be administered as pharmaceutically acceptable compositions, discussed herein.

[0454] The pharmaceutical forms suitable for injectable use include sterile aqueous solutions or dispersions and sterile powders for the extemporaneous preparation of sterile injectable solutions or dispersions. In all cases the form is sterile and is fluid to the extent that easy syringability exists. It is stable under the conditions of manufacture and storage and is preserved against the contaminating action of microorganisms, such as bacteria and fungi. The carrier can be a solvent or dispersion medium containing, for example, water, ethanol, polyol (for example, glycerol, propylene glycol, and liquid polyethylene glycol, and the like), suitable mixtures thereof, and vegetable oils. The proper fluidity can be maintained, for example, by the use of a coating, such as lecithin, by the maintenance of the required particle size in the case of dispersion and by the use of surfactants. The prevention of the action of microorganisms can be brought about by various antibacterial and antifungal agents, for example, parabens, chlorobutanol, phenol, sorbic acid, thimerosal, and the like. In certain examples, isotonic agents, for example, sugars or sodium chloride may be included. Prolonged absorption of the injectable compositions can be brought about by the use in the compositions of agents delaying absorption, for example, aluminum monostearate and gelatin.

[0455] For oral administration, the compositions may be incorporated with excipients and used in the form of non-ingestible mouthwashes and dentifrices. A mouthwash may be prepared incorporating the active ingredient in the required amount in an appropriate solvent, such as a sodium borate solution (Dobell's Solution). Alternatively, the active ingredient may be incorporated into an antiseptic wash containing sodium borate, glycerin and potassium bicarbonate. The active ingredient also may be dispersed in dentifrices, including, for example: gels, pastes, powders and slurries. The active ingredient may be added in a therapeutically effective amount to a paste dentifrice that may include, for example, water, binders, abrasives, flavoring agents, foaming agents, and humectants.

[0456] The compositions may be formulated in a neutral or salt form. Pharmaceutically-acceptable salts include, for example, the acid addition salts (formed with the free amino groups of the protein) and which are formed with inorganic acids such as, for example, hydrochloric or phosphoric acids, or such organic acids as acetic, oxalic, tartaric, mandelic, and the like. Salts formed with the free carboxyl groups can also be derived from inorganic bases such as, for example, sodium, potassium, ammonium, calcium, or ferric hydroxides, and such organic bases as isopropylamine, trimethylamine, histidine, procaine and the like.

[0457] Upon formulation, solutions will be administered in a manner compatible with the dosage formulation and in such amount as is therapeutically effective. The formulations are easily administered in a variety of dosage forms such as injectable solutions, drug release capsules and the like. For parenteral administration in an aqueous solution, for example, the solution may be suitably buffered if necessary and the liquid diluent first rendered isotonic with sufficient saline or glucose. These particular aqueous solutions are especially suitable for intravenous, intramuscular, subcutaneous and intraperitoneal administration. In this connection, sterile aqueous media can be employed. For example, one dosage could be dissolved in 1 ml of isotonic NaCl solution and either added to 1000 ml of hypodermoclysis fluid or injected at the proposed site of infusion, (see for example, “Remington's Pharmaceutical Sciences” 15th Edition, pages 1035-1038 and 1570-1580). Some variation in dosage will necessarily occur depending on the condition of the subject being treated. The person responsible for administration will, in any event, determine the appropriate dose for the individual subject. Moreover, for human administration, preparations may meet sterility, pyrogenicity, and general safety and purity standards as required by FDA Office of Biologics standards.

### EXAMPLES

[0458] The examples set forth below illustrate certain embodiments and do not limit the technology.

[0459] Mechanisms for selectively ablating the donor cells have been studied as safety switches for cellular therapies, but there have been complications. Some experience with safety-switch genes to date has been in T lymphocytes since immunotherapy with these cells has proved efficacious as treatment for viral infections and malignancies (Walter, E. A., et al., N. Engl. J. Med. 1995, 333:1038-44; Rooney, C. M., et al., Blood. 1998, 92:1549-55; Dudley, M. E., et al., Science 2002, 298:850-54; Marjit, W. A., et al., Proc. Natl. Acad. Sci. USA 2003, 100:2742-47). The herpes simplex virus I-derived thymidine kinase (HSVTK) gene has been used as an in vivo suicide switch in donor T-cell infusions to treat recurrent malignancy and Epstein Barr virus (EBV) lymphoproliferation after hematopoietic stem cell transplantation (Bonini C, et al., Science. 1997, 276:1719-1724; Tiberghien P, et al., Blood. 2001, 97:63-72). However, destruction of T cells causing graft-versus-host disease was incomplete, and the use of gancyclovir (or analogs) as a pro-drug to activate HSV-TK precludes administration of gancyclovir as an antiviral drug for cytomegalovirus infections. This mechanism of action also requires interference with DNA synthesis, relying on cell division, so that cell killing may be protracted over several days and incomplete, producing a lengthy delay in clinical benefit (Ciceri, F., et al., Lancet Oncol. 2009, 262:1019-24). Moreover, HSV-TK-directed immune responses have resulted in elimination of HSV-TK-transduced cells, even in immunosuppressed human immunodeficiency virus and bone marrow transplant patients, compromising the persistence and hence efficacy of the infused T cells. HSV-TK is also virus-derived, and therefore potentially immunogenic (Bonini C, et al., Science. 1997, 276:1719-1724; Riddell S R, et al., Nat Med. 1996, 2:216-23). The E coli-derived cytosine deaminase gene has also been used clinically (Freytag S O, et al., Cancer Res. 2002, 62:4968-4976), but as a xenoantigen it may be immunogenic and thus incompatible with T-cell-based therapies that require long-term persistence. Transgenic human CD20, which can be activated by a monoclonal chimeric anti-CD20 antibody, has been proposed as a nonimmunogenic safety system (Introna M, et al., Hum Gene Ther. 2000, 11:611-620).

[0460] The following section provides examples of method of providing a safety switch in cells used for cellular therapy, using a Caspase-9 chimeric protein.

### Example 1: Construction and Evaluation of Caspase-9 Suicide Switch Expression Vectors

### Vector Construction and Confirmation of Expression

[0461] A safety switch that can be stably and efficiently expressed in human T cells is presented herein. The system includes human gene products with low potential immunogenicity that have been modified to interact with a small molecule dimerizer drug that is capable of causing the selective elimination of transduced T cells expressing the modified gene. Additionally, the inducible Caspase-9 maintains function in T cells overexpressing antiapoptotic molecules.

[0462] Expression vectors suitable for use as a therapeutic agent were constructed that included a modified human Caspase-9 activity fused to a human FK506 binding protein (FKBP), such as, for example, FKBP12v36. The Caspase-9/FK506 hybrid activity can be dimerized using a small molecule pharmaceutical. Full length, truncated, and modified versions of the Caspase-9 activity were fused to the ligand binding domain, or multimerizing region, and inserted into the retroviral vector MSCV.IRES.GRP, which also allows expression of the fluorescent marker, GFP. FIG. 1A illustrates the full length, truncated and modified Caspase-9 expression vectors constructed and evaluated as a suicide switch for induction of apoptosis.

[0463] The full-length inducible Caspase-9 molecule (F′-F-C-Casp9) includes 2, 3, or more FK506 binding proteins (FKBPs—for example, FKBP12v36 variants) linked with a Gly-Ser-Gly-Gly-Gly-Ser linker (SEQ ID NO: 285) to the small and large subunit of the Caspase molecule (see FIG. 1A). Full-length inducible Caspase-9 (F′F-C-Casp9.I.GFP) has a full-length Caspase-9, also includes a Caspase recruitment domain (CARD; GenBank NM001 229) linked to 2 12-kDa human FK506 binding proteins (FKBP12; GenBank AH002 818) that contain an F36V mutation (FIG. 1A). The amino acid sequence of one or more of the FKBPs (F′) was codon-wobbled (e.g., the 3rd nucleotide of each amino acid codon was altered by a silent mutation that maintained the originally encoded amino acid) to prevent homologous recombination when expressed in a retrovirus. F′F-C-Casp9C3S includes a cysteine to serine mutation at position 287 that disrupts its activation site. In constructs F′F-Casp9, F-C-Casp9, and F′-Casp9, either the Caspase activation domain (CARD), one FKBP, or both, were deleted, respectively. All constructs were cloned into MSCV.IRES.GFP as EcoRI-XhoI fragments.

[0464] 293T cells were transfected with each of these constructs and 48 hours after transduction expression of the marker gene GFP was analyzed by flow cytometry. In addition, 24 hours after transfection, 293T cells were incubated overnight with 100 nM CID and subsequently stained with the apoptosis marker annexin V. The mean and standard deviation of transgene expression level (mean GFP) and number of apoptotic cells before and after exposure to the chemical inducer of dimerization (CID) (% annexin V within GFP˜cells) from 4 separate experiments are shown in the second through fifth columns of the table in FIG. 1A. In addition to the level of GFP expression and staining for annexin V, the expressed gene products of the full length, truncated and modified Caspase-9 were also analyzed by western blot to confirm the Caspase-9 genes were being expressed and the expressed product was the expected size. The results of the western blot are presented in FIG. 1B.

[0465] Coexpression of the inducible Caspase-9 constructs of the expected size with the marker gene GFP in transfected 293T cells was demonstrated by Western blot using a Caspase-9 antibody specific for amino acid residues 299-318, present both in the full-length and truncated Caspase molecules as well as a GFP-specific antibody. Western blots were performed as presented herein.

[0466] Transfected 293T cells were resuspended in lysis buffer (50% Tris/Gly, 10% sodium dodecyl sulfate [SDS], 4% beta-mercaptoethanol, 10% glycerol, 12% water, 4% bromophenol blue at 0.5%) containing aprotinin, leupeptin, and phenylmethylsulfonyl fluoride (Boehringer, Ingelheim, Germany) and incubated for 30 minutes on ice. After a 30-minute centrifugation, supernatant was harvested; mixed 1:2 with Laemmli buffer (Bio-Rad, Hercules, CA), boiled and loaded on a 10% SDS-polyacrylamide gel. The membrane was probed with rabbit anti-Caspase-9 (amino acid residues 299-3 18) immunoglobulin G (IgG; Affinity BioReagents, Golden, CO; 1:500 dilution) and with mouse anti-GFP IgG (Covance, Berkeley, CA; 1:25,000 dilution). Blots were then exposed to appropriate peroxidase-coupled secondary antibodies and protein expression was detected with enhanced chemiluminescence (ECL; Amersham, Arlington Heights, IL). The membrane was then stripped and reprobed with goat polyclonal antiactin (Santa Cruz Biotechnology; 1:500 dilution) to check equality of loading.

[0467] Additional smaller size bands, seem in FIG. 1B, likely represent degradation products. Degradation products for the F′F-C-Casp9 and F′F-Casp9 constructs may not be detected due to a lower expression level of these constructs as a result of their basal activity. Equal loading of each sample was confirmed by the substantially equal amounts of actin shown at the bottom of each lane of the western blot, indicating substantially similar amounts of protein were loaded in each lane.

[0468] An example of a chimeric polypeptide that may be expressed in the modified cells is provided herein. In this example, a single polypeptide is encoded by the nucleic acid vector. The inducible Caspase-9 polypeptide is separated from the CAR polypeptide during translation, due to skipping of a peptide bond. (Donnelly, M L 2001, J. Gen. Virol. 82:1013-25).

### Evaluation of Caspase-9 Suicide Switch Expression Constructs.

### Cell Lines

[0469] B 95-8 EBV transformed B-cell lines (LCLs), Jurkat, and MT-2 cells (kindly provided by Dr S. Marriott, Baylor College of Medicine, Houston, TX) were cultured in RPMI 1640 (Hyclone, Logan, UT) containing 10% fetal bovine serum (FBS; Hyclone). Polyclonal EBV-specific T-cell lines were cultured in 45% RPMI/45% Clicks (Irvine Scientific, Santa Ana, CA)/10% FBS and generated as previously reported. Briefly, peripheral blood mononuclear cells (2×10⁶ per well of a 24-well plate) were stimulated with autologous LCLs irradiated at 4000 rads at a responder-to-stimulator (R/S) ratio of 40:1. After 9 to 12 days, viable cells were restimulated with irradiated LCLs at an R/S ratio of 4:1. Subsequently, cytotoxic T cells (CTLs) were expanded by weekly restimulation with LCLs in the presence of 40 U/mL to 100 U/mL recombinant human interleukin-2 (rhIL-2; Proleukin; Chiron, Emeryville, CA).

### Retrovirus Transduction

[0470] For the transient production of retrovirus, 293T cells were transfected with iCasp9/iFas constructs, along with plasmids encoding gag-pol and RD 114 envelope using GeneJuice transfection reagent (Novagen, Madison, WI). Virus was harvested 48 to 72 hours after transfection, snap frozen, and stored at ˜80° C. until use. A stable FLYRD 18-derived retroviral producer line was generated by multiple transductions with VSV-G pseudotyped transient retroviral supernatant. FLYRD18 cells with highest transgene expression were single-cell sorted, and the clone that produced the highest virus titer was expanded and used to produce virus for lymphocyte transduction. The transgene expression, function, and retroviral titer of this clone was maintained during continuous culture for more than 8 weeks. For transduction of human lymphocytes, a non-tissue-culture-treated 24-well plate (Becton Dickinson, San Jose, CA) was coated with recombinant fibronectin fragment (FN CH-296; Retronectin; Takara Shuzo, Otsu, Japan; 4 g/mL in PBS, overnight at 4° C.) and incubated twice with 0.5 mL retrovirus per well for 30 minutes at 37° C. Subsequently, 3×10⁵ to 5×10⁵ T cells per well were transduced for 48 to 72 hours using 1 mL virus per well in the presence of 100 U/mL IL-2. Transduction efficiency was determined by analysis of expression of the coexpressed marker gene green fluorescent protein (GFP) on a FACScan flow cytometer (Becton Dickinson). For functional studies, transduced CTLs were either non-selected or segregated into populations with low, intermediate, or high GFP expression using a MoFlo cytometer (Dako Cytomation, Ft Collins, CO) as indicated.

### Induction and Analysis of Apoptosis

[0471] CID (AP20187; ARIAD Pharmaceuticals) at indicated concentrations was added to transfected 293T cells or transduced CTLs. Adherent and nonadherent cells were harvested and washed with annexin binding buffer (BD Pharmingen, San Jose, CA). Cells were stained with annexin-V and 7-amino-actinomycin D (7-AAD) for 15 minutes according to the manufacturer's instructions (BD Pharmingen). Within 1 hour after staining, cells were analyzed by flow cytometry using CellQuest software (Becton Dickinson).

### Cytotoxicity Assay

[0472] The cytotoxic activity of each CTL line was evaluated in a standard 4-hour ⁵¹Cr release assay, as previously presented. Target cells included autologous LCLs, human leukocyte antigen (HLA) class I-mismatched LCLs and the lymphokine-activated killer cell-sensitive T-cell lymphoma line HSB-2. Target cells incubated in complete medium or 1% Triton X-100 (Sigma, St Louis, MO) were used to determine spontaneous and maximum ⁵¹Cr release, respectively. The mean percentage of specific lysis of triplicate wells was calculated as 100×(experimental release-spontaneous release)/(maximal release-spontaneous release).

### Phenotyping

[0473] Cell-surface phenotype was investigated using the following monoclonal antibodies: CD3, CD4, CD8 (Becton Dickinson) and CD56 and TCR-□/□ (Immunotech, Miami, FL). □NGFR-iFas was detected using anti-NGFR antibody (Chromaprobe, Aptos, CA). Appropriate matched isotype controls (Becton Dickinson) were used in each experiment. Cells were analyzed with a FACSscan flow cytometer (Becton Dickinson).

### Analysis of Cytokine Production

[0474] The concentration of interferon-□ (IFN-□□), IL-2, IL-4, IL-5, IL-10, and tumor necrosis factor-□□ (TNF□) in CTL culture supernatants was measured using the Human Th1/Th2 cytokine cytometric Bead Array (BD Pharmingen) and the concentration of IL-12 in the culture supernatants was measured by enzyme-linked immunosorbent assay (ELISA; R&D Systems, Minneapolis, MN) according to the instructions of the manufacturer.

### In Vivo Experiments

[0475] Non-obese diabetic severe combined immunodeficient (NOD/SCID) mice, 6 to 8 weeks of age, were irradiated (250 rad) and injected subcutaneously in the right flank with 10×10⁶ to 15×10⁶ LCLs resuspended in Matrigel (BD Bioscience). Two weeks later mice bearing tumors that were approximately 0.5 cm in diameter were injected into the tail vein with a 1:1 mixture of nontransduced and iCasp9.I.GFPhigh-transduced EBV CTLs (total 15×10⁶). At 4 to 6 hours prior and 3 days after CTL infusion, mice were injected intraperitoneally with recombinant hIL-2 (2000 U; Proleukin; Chiron). On day 4, the mice were randomly segregated in 2 groups: 1 group received CID (50 □g AP20187, intraperitoneally) and 1 group received carrier only (16.7% propanediol, 22.5% PEG400, and 1.25% Tween 80, intraperitoneally). On day 7, all mice were killed. Tumors were homogenized and stained with antihuman CD3 (BD Pharmingen). By FACS analysis, the number of GFP□+ cells within the gated CD3⁺ population was evaluated. Tumors from a control group of mice that received only nontransduced CTLs (total 15×10⁶) were used as a negative control in the analysis of CD3⁺/GFP⁺ cells.

### Optimization of Expression and Function of Inducible Caspase-9

[0476] Caspases 3, 7, and 9 were screened for their suitability as inducible safety-switch molecules both in transfected 293T cells and in transduced human T cells. Only inducible Caspase-9 (iCasp9) was expressed at levels sufficient to confer sensitivity to the chosen CID (e.g., chemical inducer of dimerization). An initial screen indicated that the full length iCasp9 could not be maintained stably at high levels in T cells, possibly due to transduced cells being eliminated by the basal activity of the transgene. The CARD domain is involved in physiologic dimerization of Caspase-9 molecules, by a cytochrome C and adenosine triphosphate (ATP)-driven interaction with apoptotic protease-activating factor 1 (Apaf-1). Because of the use of a CID to induce dimerization and activation of the suicide switch, the function of the CARD domain is superfluous in this context and removal of the CARD domain was investigated as a method of reducing basal activity. Given that only dimerization rather than multimerization is required for activation of Caspase-9, a single FKBP12v36 domain also was investigated as a method to effect activation.

[0477] The activity of the resultant truncated and/or modified forms of Caspase-9 (e.g., the CARD domain, or one of the 2 FKBP domains, or both, are removed) were compared. A construct with a disrupted activation site, F′F-C-Casp9_{c->s}, provided a nonfunctional control (see FIG. 1A). All constructs were cloned into the retroviral vector MSCV26 in which retroviral long terminal repeats (LTRs) direct transgene expression and enhanced GFP is coexpressed from the same mRNA by use of an internal ribosomal entry site (IRES). In transfected 293T cells, expression of all inducible Caspase-9 constructs at the expected size as well as coexpression of GFP was demonstrated by Western blot (see FIG. 1B). Protein expression (estimated by mean fluorescence of GFP and visualized on Western blot) was highest in the nonfunctional construct F′F-C-Casp9_{c->s} and greatly diminished in the full-length construct F′F-C-Casp9. Removal of the CARD (F′F-Casp9), one FKBP (F-C-Casp9), or both (F-Casp9) resulted in progressively higher expression of both inducible Caspase-9 and GFP, and correspondingly enhanced sensitivity to CID (see FIG. 1A). Based on these results, the F-Casp9 construct (henceforth referred to as iCasp9M) was used for further study in human T lymphocytes.

Stable Expression of iCasp9_{M} in Human T Lymphocytes

[0478] The long-term stability of suicide gene expression is of utmost importance, since suicide genes must be expressed for as long as the genetically engineered cells persist. For T-cell transduction, a FLYRD18-derived retroviral producer clone that produces high-titer RD114-pseudotyped virus was generated to facilitate the transduction of T cells. iCasp9_{M} expression in EBV-specific CTL lines (EBV-CTL) was evaluated since EBV-specific CTL lines have well-characterized function and specificity and are already being used as in vivo therapy for prevention and treatment of EBV-associated malignancies. Consistent transduction efficiencies of EBV-CTLs of more than 70% (mean, 75.3%; range, 71.4%-83.0% in 5 different donors) were obtained after a single transduction with retrovirus. The expression of iCasp9_{M} in EBV-CTLs was stable for at least 4 weeks after transduction without selection or loss of transgene function.

iCasp9_{M} does not Alter Transduced T-Cell Characteristics

[0479] To ensure that expression of iCasp9_{M} did not alter T-cell characteristics, the phenotype, antigen-specificity, proliferative potential, and function of nontransduced or nonfunctional iCasp9_{c->s}-transduced EBV-CTLs was compared with that of iCasp9_{M}-transduced EBV-CTLs. In 4 separate donors, transduced and nontransduced CTLs consisted of equal numbers of CD4⁺, CD8⁺, CD56⁺, and TCR□□/□+ cells. Similarly, production of cytokines including IFN-□, TNF□, IL-10, IL-4, IL-5, and IL-2 was unaltered by iCasp9_{M} expression. iCasp9_{M}-transduced EBV-CTLs specifically lysed autologous LCLs comparable to nontransduced and control-transduced CTLs. Expression of iCasp9_{M} did not affect the growth characteristics of exponentially growing CTLs, and importantly, dependence on antigen and IL-2 for proliferation was preserved. On day 21 after transduction, the normal weekly antigenic stimulation with autologous LCLs and IL-2 was continued or discontinued. Discontinuation of antigen stimulation resulted in a steady decline of T cells.

Elimination of More than 99% of T Lymphocytes Selected for High Transgene Expression In Vitro

[0480] Inducible iCasp9 proficiency in CTLs was tested by monitoring loss of GFP-expressing cells after administration of CID; 91.3% (range, 89.5%-92.6% in 5 different donors) of GFP⁺ cells were eliminated after a single 10-nM dose of CID. Similar results were obtained regardless of exposure time to CID (range, 1 hour-continuous). In all experiments, CTLs that survived CID treatment had low transgene expression with a 70% (range, 55%-82%) reduction in mean fluorescence intensity of GFP after CID. No further elimination of the surviving GFP⁺T cells could be obtained by an antigenic stimulation followed by a second 10-nM dose of CID. Therefore, the non-responding CTLs most likely expressed insufficient iCasp9_{M} for functional activation by CID. To investigate the correlation between low levels of expression and CTL non-response to CID, CTLs were sorted for low, intermediate, and high expression of the linked marker gene GFP and mixed 1:1 with nontransduced CTLs from the same donor to allow for an accurate quantitation of the number of transduced T cells responding to CID-induced apoptosis.

[0481] The number of transduced T cells eliminated increased with the level of GFP transgene expression (see FIGS. 4A, 4B and 4C). To determine the correlation between transgene expression and function of iCasp9_{M}, iCasp9_{M} IRES.GFP-transduced EBV-CTL were selected for low (mean 21), intermediate (mean 80) and high (mean 189) GFP expression. Selected T-cells were incubated overnight with 10 nM CID and subsequently stained with annexin V and 7-AAD. Indicated are the percentages of annexin V+/7-AAD− and annexin V+/7-AAD+T−. Selected T-cells were mixed 1:1 with non-transduced T-cells and incubated with 10 nM CID following antigenic stimulation. Indicated is the percentage of residual GFP-positive T-cells on day 7.

[0482] For GFP_{high}-selected cells, 10 nM CID led to deletion of 99.1% (range, 98.7%-99.4%) of transduced cells. On the day of antigen stimulation, F-Casp9_{M}.I.GFP-transduced CTLs were either untreated or treated with 10 nM CID. Seven days later, the response to CID was measured by flow cytometry for GFP. The percentage of transduced T cells was adjusted to 50% to allow for an accurate measurement of residual GFP⁺ cells after CID treatment. The responses to CID in unselected (top row of and GFP_{high}-selected CTLs (bottom row of was compared. The percentage of residual GFP⁺ cells is indicated.

[0483] Rapid induction of apoptosis in the GFP_{high}-selected cells is demonstrated by apoptotic characteristics such as cell shrinkage and fragmentation within 14 hours of CID administration. After overnight incubation with 10 nM CID, F-Casp9_{M}.I.GFP_{high}-transduced T cells had apoptotic characteristics such as cell shrinkage and fragmentation by microscopic evaluation. Of the T cells selected for high expression, 64% (range, 59%-69%) had an apoptotic (annexin-V⁺+/7-AAD⁻) and 30% (range, 26%-32%) had a necrotic (annexinV⁺/7-AAD⁺) phenotype. Staining with markers of apoptosis showed that 64% of T cells had an apoptotic phenotype (annexin V⁺, 7-AAD⁻, lower right quadrant) and 32% a necrotic phenotype (annexin V⁺, 7-AAD⁺, upper right quadrant). A representative example of 3 separate experiments is shown.

[0484] In contrast, the induction of apoptosis was significantly lower in T cells selected for intermediate or low GFP expression (see FIGS. 4A, 4B and 4C). For clinical applications therefore, versions of the expression constructs with selectable markers that allow selection for high copy number, high levels of expression, or both high copy number and high levels of expression may be desirable. CID-induced apoptosis was inhibited by the panCaspase inhibitor zVAD-fmk (100 μM for 1 hour prior to adding CID. Titration of CID showed that 1 nM CID was sufficient to obtain the maximal deletion effect. A dose-response curve using the indicated amounts of CID (AP20187) shows the sensitivity of F-Casp9_{M}.I.GFP_{high} to CID. Survival of GFP⁺ cells is measured on day 7 after administration of the indicated amount of CID. The mean and standard deviation for each point are given. Similar results were obtained using another chemical inducer of dimerization (CID), AP1903, which was clinically shown to have substantially no adverse effects when administered to healthy volunteers. The dose response remained unchanged for at least 4 weeks after transduction.

iCasp9_{M} is Functional in Malignant Cells that Express Antiapoptotic Molecules

[0485] Caspase-9 was selected as an inducible proapoptotic molecule for clinical use rather than previously presented iFas and iFADD, because Caspase-9 acts relatively late in apoptosis signaling and therefore is expected to be less susceptible to inhibition by apoptosis inhibitors. Thus, suicide function should be preserved not only in malignant, transformed T-cell lines that express antiapoptotic molecules, but also in subpopulations of normal T cells that express elevated antiapoptotic molecules as part of the process to ensure long-term preservation of memory cells. To further investigate the hypothesis, the function of iCasp9_{M} and iFas was first compared in EBV-CTLs. To eliminate any potential vector based difference, inducible Fas also was expressed in the MSCV.IRES.GFP vector, like iCasp9. For these experiments both ΔNGFR.iFas.I.GFP and iCasp9_{M}.I.GFP-transduced CTLs were sorted for GFP_{high} expression and mixed with nontransduced CTLs at a 1:1 ratio to obtain cell populations that expressed either iFas or iCasp9_{M} at equal proportions and at similar levels. The EBV-CTLs were sorted for high GFP expression and mixed 1:1 with nontransduced CTLs as presented. The percentages of ΔNGFR⁺/GFP⁺ and GFP⁺T cells are indicated.

[0486] Elimination of GFP⁺ cells after administration of 10 nM CID was more rapid and more efficient in iCasp9_{M} than in iFas-transduced CTLs (99.2%+/−0.14% of iCasp9_{M}-transduced cells compared with 89.3%+/−4.9% of iFas-transduced cells at day 7 after CID; P<05). On the day of LCL stimulation, 10 nM CID was administered, and GFP was measured at the time points indicated to determine the response to CID. Black diamonds represent data for ΔNGFR-iFas.I.GFP; black squares represent data for iCasp9_{M}.I.GFP. Mean and standard deviation of 3 experiments are shown.

[0487] The function of iCasp9_{M} and iFas was also compared in 2 malignant T-cell lines: Jurkat, an apoptosis-sensitive T-cell leukemia line, and MT-2, an apoptosis-resistant T-cell line, due to c-FLIP and bcl-xL expression. Jurkat cells and MT-2 cells were transduced with iFas and iCasp9m with similar efficiencies (92% vs 84% in Jurkat, 76% vs 70% in MT-2) and were cultured in the presence of 10 nM CID for 8 hours. Annexin-V staining showed that although iFas and iCasp9_{M} induced apoptosis in an equivalent number of Jurkat cells (56.4%+/−15.6% and 57.2%+/−18.9%, respectively), only activation of iCasp9_{M} resulted in apoptosis of MT-2 cells (19.3%+/−8.4% and 57.9%+/−11.9% for iFas and iCasp9_{M}, respectively; see FIG. 5C).

[0488] The human T-cell lines Jurkat (left) and MT-2 (right) were transduced with ΔNGFR-iFas.I.GFP or iCasp9_{M}.I.GFP. An equal percentage of T cells were transduced with each of the suicide genes: 92% for ΔNGFR-iFas.I.GFP versus 84% for iCasp9_{M}.I.GFP in Jurkat, and 76% for ΔNGFR-iFas.I.GFP versus 70% for iCasp9_{M}.I.GFP in MT-2. T cells were either nontreated or incubated with 10 nM CID. Eight hours after exposure to CID, apoptosis was measured by staining for annexin V and 7-AAD. A representative example of 3 experiments is shown. PE indicates phycoerythrin. These results demonstrate that in T cells overexpressing apoptosis-inhibiting molecules, the function of iFas can be blocked, while iCasp9_{M} can still effectively induce apoptosis.

iCasp9_{M}-Mediated Elimination of T Cells Expressing an Immunomodulatory Transgene

[0489] To determine whether iCasp9_{M} could effectively destroy cells genetically modified to express an active transgene product, the ability of iCasp9_{M} to eliminate EBV-CTLs stably expressing IL-12 was measured. While IL-12 was undetectable in the supernatant of nontransduced and iCasp9_{M}.IRES.GFP-transduced CTLs, the supernatant of iCasp9_{M}.IRES.IL-12-transduced cells contained 324 μg/mL to 762 μg/mL IL-12. After administration of 10 nM CID, however, the IL-12 in the supernatant fell to undetectable levels (<7.8 pg/mL). Thus, even without prior sorting for high transgene expressing cells, activation of iCasp9_{M} is sufficient to completely eliminate all T cells producing biologically relevant levels of IL-12. The marker gene GFP in the iCasp9_{M}.I.GFP constructs was replaced by flexi IL-12, encoding the p40 and p35 subunits of human IL-12. iCasp9_{M}.I.GFP- and iCasp9_{M}.I.IL-12-transduced EBV-CTLs were stimulated with LCLs, and then left untreated or exposed to 10 nM CID. Three days after a second antigenic stimulation, the levels of IL-12 in the culture supernatant were measured by IL-12 ELISA (detection limit of this assay is 7.8 pg/mL). The mean and standard deviation of triplicate wells are indicated. Results of 1 of 2 experiments with CTLs from 2 different donors are shown.

Elimination of More than 99% of T Cells Selected for High Transgene Expression In Vivo

[0490] The function of iCasp9_{M} also was evaluated in transduced EBV-CTLs in vivo. A SCID mouse-human xenograft model was used for adoptive immunotherapy. After intravenous infusion of a 1:1 mixture of nontransduced and iCasp9_{M}.IRES.GFP_{high}-transduced CTLs into SCID mice bearing an autologous LCL xenograft, mice were treated either with a single dose of CID or carrier only. Three days after CID/carrier administration, tumors were analyzed for human CD3⁺/GFP⁺ cells. Detection of the nontransduced component of the infusion product, using human anti-CD3 antibodies, confirmed the success of the tail-vein infusion in mice that received CID. In mice treated with CID, there was more than a 99% reduction in the number of human CD3⁺/GFP⁺ T cells, compared with infused mice treated with carrier alone, demonstrating equally high sensitivity of iCasp9_{M}-transduced T cells in vivo and in vitro.

[0491] The function of iCasp9_{M} in vivo, was assayed. NOD/SCID mice were irradiated and injected subcutaneously with 10×10⁶ to 15×10⁶ LCLs. After 14 days, mice bearing tumors of 0.5 cm in diameter received a total of 15×10⁶ EBV-CTLs (50% of these cells were nontransduced and 50% were transduced with iCasp9_{M}.I.GFP and sorted for high GFP expression). On day 3 after CTL administration, mice received either CID (50 g AP20187; (black diamonds, n=6) or carrier only (black squares, n=5) and on day 6 the presence of human CD3⁺/GFP⁺ T cells in the tumors was analyzed. Human CD3⁺ T cells isolated from the tumors of a control group of mice that received only nontransduced CTLs (15×10⁶ CTLs; n=4) were used as a negative control for the analysis of CD3⁺/GFP⁺ T cells within the tumors.

### DISCUSSION

[0492] Presented herein are expression vectors expressing suicide genes suitable for eliminating gene-modified T cells in vivo, in some embodiments. Suicide gene expression vectors presented herein have certain non-limiting advantageous features including stable coexpression in all cells carrying the modifying gene, expression at levels high enough to elicit cell death, low basal activity, high specific activity, and minimal susceptibility to endogenous antiapoptotic molecules. Presented herein, in certain embodiments, is an inducible Caspase-9, iCasp9_{M}, which has low basal activity allowing stable expression for more than 4 weeks in human T cells. A single 10-nM dose of a small molecule chemical inducer of dimerization (CID) is sufficient to kill more than 99% of iCasp9_{M}-transduced cells selected for high transgene expression both in vitro and in vivo. Moreover, when coexpressed with Th1 cytokine IL-12, activation of iCasp9_{M} eliminated all detectable IL-12-producing cells, even without selection for high transgene expression. Caspase-9 acts downstream of most antiapoptotic molecules, therefore, a high sensitivity to CID is preserved regardless of the presence of increased levels of antiapoptotic molecules of the bcl-2 family. Thus, iCasp9_{M} also may prove useful for inducing destruction even of transformed T cells and memory T cells that are relatively resistant to apoptosis.

[0493] Unlike other Caspase molecules, proteolysis does not appear sufficient for activation of Caspase-9. Crystallographic and functional data indicate that dimerization of inactive Caspase-9 monomers leads to conformational change-induced activation. The concentration of pro-Caspase-9, in a physiologic setting, is in the range of about 20 nM, well below the threshold needed for dimerization.

[0494] Without being limited by theory, it is believed the energetic barrier to dimerization can be overcome by homophilic interactions between the CARD domains of Apaf-1 and Caspase-9, driven by cytochrome C and ATP. Overexpression of Caspase-9 joined to 2 FKBPs may allow spontaneous dimerization to occur and can account for the observed toxicity of the initial full length Caspase-9 construct. A decrease in toxicity and an increase in gene expression was observed following removal of one FKBP, most likely due to a reduction in toxicity associated with spontaneous dimerization. While multimerization often is involved in activation of surface death receptors, dimerization of Caspase-9 should be sufficient to mediate activation. Data presented herein indicates that iCasp9 constructs with a single FKBP function as effectively as those with 2 FKBPs. Increased sensitivity to CID by removal of the CARD domain may represent a reduction in the energetic threshold of dimerization upon CID binding.

[0495] The persistence and function of virus- or bacteria-derived lethal genes, such as HSV-TK and cytosine deaminase, can be impaired by unwanted immune responses against cells expressing the virus or bacteria derived lethal genes. The FKBPs and proapoptotic molecules that form the components of iCasp9_{M} are human-derived molecules and are therefore less likely to induce an immune response. Although the linker between FKBP and Caspase-9 and the single point mutation in the FKBP domain introduce novel amino acid sequences, the sequences were not immunologically recognized by macaque recipients of iFas-transduced T cells. Additionally, because the components of iCasp9_{M} are human-derived molecules, no memory T cells specific for the junction sequences should be present in a recipient, unlike virus-derived proteins such as HSV-TK, thereby reducing the risk of immune response-mediated elimination of iCasp9_{M}-transduced T cells.

[0496] Previous studies using inducible Fas or the death effector domains (DED) of Fas associated death domain proteins (FADD) showed that approximately 10% of transduced cells were unresponsive to activation of the destructive gene. As observed in experiments presented here, a possible explanation for unresponsiveness to CID is low expression of the transgene. The iCasp9_{M}-transduced T cells in our study and iFas-transduced T cells in studies by others that survived after CID administration had low levels of transgene expression. In an attempt to overcome a perceived retroviral “positional effect”, increased levels of homogeneous expression of the transgene were achieved by flanking retroviral integrants with the chicken beta-globin chromatin insulator. Addition of the chromatin insulator dramatically increased the homogeneity of expression in transduced 293T cells, but had no significant effect in transduced primary T cell. Selection of T cells with high expression levels minimized variability of response to the dimerizer. Over 99% of transduced T cells sorted for high GFP expression were eliminated after a single 10-nM CID dose. This demonstration supports the hypothesis that cells expressing high levels of suicide gene can be isolated using a selectable marker.

[0497] A very small number of resistant residual cells may cause a resurgence of toxicity, a deletion efficiency of up to 2 logs will significantly decrease this possibility. For clinical use, coexpression with a nonimmunogenic selectable marker such as truncated human NGFR, CD20, or CD34 (e.g., instead of GFP) will allow for selection of high transgene-expressing T cells. Coexpression of the suicide switch (e.g., iCASP9_{M}) and a suitable selectable marker (e.g., truncated human NGFR, CD20, CD34, the like and combinations thereof) can be obtained using either an internal ribosome entry site (IRES) or posttranslational modification of a fusion protein containing a self-cleaving sequence (eg, 2A). In contrast, in situations where the sole safety concern is the transgene-mediated toxicity (eg, artificial T-cell receptors, cytokines, the like or combinations thereof), this selection step may be unnecessary, as tight linkage between iCasp9_{M} and transgene expression enables elimination of substantially all cells expressing biologically relevant levels of the therapeutic transgene. This was demonstrated by coexpressing iCasp9_{M} with IL-12. Activation of iCasp9_{M} substantially eliminated any measurable IL-12 production. The success of transgene expression and subsequent activation of the “suicide switch” may depend on the function and the activity of the transgene.

[0498] Another possible explanation for unresponsiveness to CID is that high levels of apoptosis inhibitors may attenuate CID-mediated apoptosis. Examples of apoptosis inhibitors include c-FLIP, bcl-2 family members and inhibitors of apoptosis proteins (IAPs), which normally regulate the balance between apoptosis and survival. For instance, upregulation of c-FLIP and bcl-2 render a subpopulation of T cells, destined to establish the memory pool, resistant to activation-induced cell death in response to cognate target or antigen-presenting cells. In several T-lymphoid tumors, the physiologic balance between apoptosis and survival is disrupted in favor of cell survival. A suicide gene should delete substantially all transduced T cells including memory and malignantly transformed cells. Therefore, the chosen inducible suicide gene should retain a significant portion if not substantially all of its activity in the presence of increased levels of antiapoptotic molecules.

[0499] The apical location of iFas (or iFADD) in the apoptosis signaling pathway may leave it especially vulnerable to inhibitors of apoptosis, thus making these molecules less well suited to being the key component of an apoptotic safety switch. Caspase 3 or 7 would seem well suited as terminal effector molecules; however neither could be expressed at functional levels in primary human T cells. Therefore Caspase-9, was chosen as the suicide gene, because Capsase-9 functions late enough in the apoptosis pathway that it bypasses the inhibitory effects of c-FLIP and antiapoptotic bcl-2 family members, and Caspase-9 also could be expressed stably at functional levels. Although X-linked inhibitor of apoptosis (XIAP) could in theory reduce spontaneous Caspase-9 activation, the high affinity of AP20187 (or AP1903) for FKBPᵥ₃₆ may displace this noncovalently associated XIAP. In contrast to iFas, iCasp9_{M} remained functional in a transformed T-cell line that overexpresses antiapoptotic molecules, including bcl-xL.

[0500] Presented herein is an inducible safety switch, designed specifically for expression from an oncoretroviral vector by human T cells. iCasp9_{M} can be activated by AP1903 (or analogs), a small chemical inducer of dimerization that has proven safe at the required dose for optimum deletional effect, and unlike ganciclovir or rituximab has no other biologic effects in vivo. Therefore, expression of this suicide gene in T cells for adoptive transfer can increase safety and also may broaden the scope of clinical applications.

### Example 2: Using the iCasp9 Suicide Gene to Improve the Safety of Allodepleted T Cells after Haploidentical Stem Cell Transplantation

[0501] Presented in this example are expression constructs and methods of using the expression constructs to improve the safety of allodepleted T cells after haploidentical stem cell transplantation. A retroviral vector encoding iCasp9 and a selectable marker (truncated CD19) was generated as a safety switch for donor T cells. Even after allodepletion (using anti-CD25 immunotoxin), donor T cells could be efficiently transduced, expanded, and subsequently enriched by CD19 immunomagnetic selection to >90% purity. The engineered cells retained anti-viral specificity and functionality, and contained a subset with regulatory phenotype and function. Activating iCasp9 with a small-molecule dimerizer rapidly produced >90% apoptosis. Although transgene expression was downregulated in quiescent T cells, iCasp9 remained an efficient suicide gene, as expression was rapidly upregulated in activated (alloreactive) T cells.

### Materials and Methods

### Generation of Allodepleted T Cells

[0502] Allodepleted cells were generated from healthy volunteers as previously presented. Briefly, peripheral blood mononuclear cells (PBMCs) from healthy donors were co-cultured with irradiated recipient Epstein Barr virus (EBV)-transformed lymphoblastoid cell lines (LCL) at responder-to-stimulator ratio of 40:1 in serum-free medium (AIM V; Invitrogen, Carlsbad, CA). After 72 hours, activated T cells that expressed CD25 were depleted from the co-culture by overnight incubation in RFT5-SMPT-dgA immunotoxin. Allodepletion was considered adequate if the residual CD3⁺CD25⁺ population was <1% and residual proliferation by 3H-thymidine incorporation was <10%.

### Plasmid and Retrovirus

[0503] SFG.iCasp9.2A.CD19 consists of inducible Caspase-9 (iCasp9) linked, via a cleavable 2A-like sequence, to truncated human CD19. iCasp9 consists of a human FK5 06-binding protein (FKBP12; GenBank AH002 818) with an F36V mutation, connected via a Ser-Gly-Gly-Gly-Ser linker (SEQ ID NO: 286) to human Caspase-9 (CASP9; GenBank NM 001229). The F36V mutation increases the binding affinity of FKBP12 to the synthetic homodimerizer, AP20187 or AP1903. The Caspase recruitment domain (CARD) has been deleted from the human Caspase-9 sequence because its physiological function has been replaced by FKBP12, and its removal increases transgene expression and function. The 2A-like sequence encodes an 20 amino acid peptide from Thosea asigna insect virus, which mediates >99% cleavage between a glycine and terminal proline residue, resulting in 19 extra amino acids in the C terminus of iCasp9, and one extra proline residue in the N terminus of CD19. CD19 consists of full-length CD19 (GenBank NM 001770) truncated at amino acid 333 (TDPTRRF (SEQ ID NO: 290)), which shortens the intracytoplasmic domain from 242 to 19 amino acids, and removes all conserved tyrosine residues that are potential sites for phosphorylation.

[0504] A stable PG13 clone producing Gibbon ape leukemia virus (Gal-V) pseudotyped retrovirus was made by transiently transfecting Phoenix Eco cell line (ATCC product #SD3444; ATCC, Manassas, VA) with SFG.iCasp9.2A.CD19. This produced Eco-pseudotyped retrovirus. The PG13 packaging cell line (ATCC) was transduced three times with Eco-pseudotyped retrovirus to generate a producer line that contained multiple SFG.iCasp9.2A.CD19 proviral integrants per cell. Single cell cloning was performed, and the PG13 clone that produced the highest titer was expanded and used for vector production.

### Retroviral Transduction

[0505] Culture medium for T cell activation and expansion consisted of 45% RPMI 1640 (Hyclone, Logan, UT), 45% Clicks (Irvine Scientific, Santa Ana, CA) and 10% fetal bovine serum (FBS; Hyclone). Allodepleted cells were activated by immobilized anti-CD3 (OKT3; Ortho Biotech, Bridgewater, NJ) for 48 hours before transduction with retroviral vector. Selective allodepletion was performed by co-culturing donor PBMC with recipient EBV-LCL to activate alloreactive cells: activated cells expressed CD25 and were subsequently eliminated by anti-CD25 immunotoxin. The allodepleted cells were activated by OKT3 and transduced with the retroviral vector 48 hours later. Immunomagnetic selection was performed on day 4 of transduction; the positive fraction was expanded for a further 4 days and cryopreserved.

[0506] In small-scale experiments, non-tissue culture-treated 24-well plates (Becton Dickinson, San Jose, CA) were coated with OKT3 1 g/ml for 2 to 4 hours at 37° C. Allodepleted cells were added at 1×10⁶ cells per well. At 24 hours, 100 U/ml of recombinant human interleukin-2 (IL-2) (Proleukin; Chiron, Emeryville, CA) was added. Retroviral transduction was performed 48 hours after activation. Non-tissue culture-treated 24-well plates were coated with 3.5 □g/cm² recombinant fibronectin fragment (CH-296; Retronectin; Takara Mirus Bio, Madison, WI) and the wells loaded twice with retroviral vector-containing supernatant at 0.5 ml per well for 30 minutes at 37° C., following which OKT3-activated cells were plated at 5×10⁵ cells per well in fresh retroviral vector-containing supernatant and T cell culture medium at a ratio of 3:1, supplemented with 100 U/ml IL-2. Cells were harvested after 2 to 3 days and expanded in the presence of 50 U/ml IL-2.

### Scaling-Up Production of Gene-Modified Allodepleted Cells

[0507] Scale-up of the transduction process for clinical application used non-tissue culture-treated T75 flasks (Nunc, Rochester, NY), which were coated with 10 ml of OKT3 1 □g/ml or 10 ml of fibronectin 7 □g/ml at 4° C. overnight. Fluorinated ethylene propylene bags corona-treated for increased cell adherence (2 PF-0072AC, American Fluoroseal Corporation, Gaithersburg, MD) were also used. Allodepleted cells were seeded in OKT3-coated flasks at 1×10⁶ cells/ml. 100 U/ml IL-2 was added the next day. For retroviral transduction, retronectin-coated flasks or bags were loaded once with 10 ml of retrovirus-containing supernatant for 2 to 3 hours. OKT3-activated T cells were seeded at 1×10⁶ cells/ml in fresh retroviral vector-containing medium and T cell culture medium at a ratio of 3:1, supplemented with 100 U/ml IL-2. Cells were harvested the following morning and expanded in tissue-culture treated T75 or T175 flasks in culture medium supplemented with between about 50 to 100 U/ml IL-2 at a seeding density of between about 5×10⁵ cells/ml to 8×10⁵ cells/ml.

### CD19 Immunomagnetic Selection

[0508] Immunomagnetic selection for CD19 was performed 4 days after transduction. Cells were labeled with paramagnetic microbeads conjugated to monoclonal mouse anti-human CD19 antibodies (Miltenyi Biotech, Auburn, CA) and selected on MS or LS columns in small scale experiments and on a CliniMacs Plus automated selection device in large scale experiments. CD19-selected cells were expanded for a further 4 days and cryopreserved on day 8 post transduction. These cells were referred to as “gene-modified allodepleted cells”.

### Immunophenotyping and Pentamer Analysis

[0509] Flow cytometric analysis (FACSCalibur and CellQuest software; Becton Dickinson) was performed using the following antibodies: CD3, CD4, CD8, CD19, CD25, CD27, CD28, CD45RA, CD45RO, CD56 and CD62L. CD19-PE (Clone 4G7; Becton Dickinson) was found to give optimum staining and was used in all subsequent analysis. A Non-transduced control was used to set the negative gate for CD19. An HLA-pentamer, HLA-B8-RAKFKQLL (SEQ ID NO: 287) (Proimmune, Springfield, VA) was used to detect T cells recognizing an epitope from EBV lytic antigen (BZLF1). HLA-A2-NLVPMVATV (SEQ ID NO: 288) pentamer was used to detect T cells recognizing an epitope from CMV-pp65 antigen.

### Interferon-ELISpot Assay for Anti-Viral Response

[0510] Interferon-ELISpot for assessment of responses to EBV, CMV and adenovirus antigens was performed using known methods. Gene-modified allodepleted cells cryopreserved at 8 days post-transduction were thawed and rested overnight in complete medium without IL-2 prior to use as responder cells. Cryopreserved PBMCs from the same donor were used as comparators. Responder cells were plated in duplicate or triplicate in serial dilutions of 2×10⁵, 1×10⁵, 5×10⁴ and 2.5×10⁴ cells per well. Stimulator cells were plated at 1×10⁵ per well. For response to EBV, donor-derived EBV-LCLs irradiated at 40Gy were used as stimulators. For response to adenovirus, donor-derived activated monocytes infected with Ad5f35 adenovirus were used.

[0511] Briefly, donor PBMCs were plated in X-Vivo 15 (Cambrex, Walkersville, MD) in 24-well plates overnight, harvested the next morning, infected with Ad5f35 at a multiplicity of infection (MOI) of 200 for 2 hours, washed, irradiated at 30Gy, and used as stimulators. For anti-CMV response, a similar process using Ad5f35 adenovirus encoding the CMV pp65 transgene (Ad5f35-pp65) at an MOI of 5000 was used. Specific spot-forming units (SFU) were calculated by subtracting SFU from responder-alone and stimulator-alone wells from test wells. Response to CMV was the difference in SFU between Ad5f35-pp65 and Ad5f35 wells.

### EBV-Specific Cytotoxicity

[0512] Gene-modified allodepleted cells were stimulated with 40Gy-irradiated donor-derived EBVLCL at a responder:stimulator ratio of 40:1. After 9 days, the cultures were restimulated at a responder:stimulator ratio of 4:1. Restimulation was performed weekly as indicated. After two or three rounds of stimulation, cytotoxicity was measured in a 4-hour 51 Cr-release assay, using donor EBV-LCL as target cells and donor OKT3 blasts as autologous controls. NK activity was inhibited by adding 30-fold excess of cold K562 cells.

Induction of Apoptosis with Chemical Inducer of Dimerization, AP20187

[0513] Suicide gene functionality was assessed by adding a small molecule synthetic homodimerizer, AP20187 (Ariad Pharmaceuticals; Cambridge, MA), at 10 nM final concentration the day following CD19 immunomagnetic selection. Cells were stained with annexin V and 7-amino-actinomycin (7-AAD) (BD Pharmingen) at 24 hours and analyzed by flow cytometry. Cells negative for both annexin V and 7-AAD were considered viable, cells that were annexin V positive were apoptotic, and cells that were both annexin V and 7-AAD positive were necrotic. The percentage killing induced by dimerization was corrected for baseline viability as follows: Percentage killing=100%−(% Viability in AP20187-treated cells+% Viability in non-treated cells).

### Assessment of Transgene Expression Following Extended Culture and Reactivation

[0514] Cells were maintained in T cell medium containing 50 U/ml IL-2 until 22 days after transduction. A portion of cells was reactivated on 24-well plates coated with 1 g/ml OKT3 and 1 □g/ml anti-CD28 (Clone CD28.2, BD Pharmingen, San Jose, CA) for 48 to 72 hours. CD19 expression and suicide gene function in both reactivated and non-reactivated cells were measured on day 24 or 25 post transduction.

[0515] In some experiments, cells also were cultured for 3 weeks post transduction and stimulated with 30G□ irradiated allogeneic PBMC at a responder:stimulator ratio of 1:1. After 4 days of co-culture, a portion of cells was treated with 10 nM AP20187. Killing was measured by annexin V/7-AAD staining at 24 hours, and the effect of dimerizer on bystander virus-specific T cells was assessed by pentamer analysis on AP20187-treated and untreated cells.

### Regulatory T Cells

[0516] CD4, CD25 and Foxp3 expression was analyzed in gene-modified allodepleted cells using flow cytometry. For human Foxp3 staining, the eBioscience (San Diego, CA) staining set was used with an appropriate rat IgG2a isotype control. These cells were co-stained with surface CD25-FITC and CD4-PE. Functional analysis was performed by co-culturing CD4⁺25⁺ cells selected after allodepletion and gene modification with carboxyfluorescein diacetate N-succinimidyl ester (CFSE)-labeled autologous PBMC. CD4⁺25⁺ selection was performed by first depleting CD8⁺ cells using anti-CD 8 microbeads (Miltenyi Biotec, Auburn, CA), followed by positive selection using anti-CD25 microbeads (Miltenyi Biotec, Auburn, CA). CFSE-labeling was performed by incubating autologous PBMC at 2×10⁷/ml in phosphate buffered saline containing 1.5 □M CFSE for 10 minutes. The reaction was stopped by adding an equivalent volume of FBS and incubating for 10 minutes at 37° C. Cells were washed twice before use. CFSE-labeled PBMCs were stimulated with OKT3 500 ng/ml and 40G-irradiated allogeneic PBMC feeders at a PBMC: allogeneic feeder ratio of 5:1. The cells were then cultured with or without an equal number of autologous CD4⁺25⁺ gene-modified allodepleted cells. After 5 days of culture, cell division was analyzed by flow cytometry; CD19 was used to gate out non-CFSE-labeled CD4⁺CD25⁺ gene-modified T cells.

### Statistical Analysis

[0517] Paired, 2-tailed Student's t test was used to determine the statistical significance of differences between samples. All data are represented as mean±1 standard deviation.

### Results

[0518] Selectively allodepleted T cells can be efficiently transduced with iCasp9 and expanded Selective allodepletion was performed in accordance with clinical protocol procedures. Briefly, 3/6 to 5/6 HLA-mismatched PBMC and lymphoblastoid cell lines (LCL) were co-cultured. RFT5-SMPT-dgA immunotoxin was applied after 72 hours of co-culture and reliably produced allodepleted cells with <10% residual proliferation (mean 4.5±2.8%; range 0.74 to 9.1%; 10 experiments) and containing <1% residual CD3⁺CD25⁺ cells (mean 0.23±0.20%; range 0.06 to 0.73%; 10 experiments), thereby fulfilling the release criteria for selective allodepletion, and serving as starting materials for subsequent manipulation.

[0519] Allodepleted cells activated on immobilized OKT3 for 48 hours could be efficiently transduced with Gal-V pseudotyped retrovirus vector encoding SFG.iCasp9.2A.CD19. Transduction efficiency assessed by FACS analysis for CD19 expression 2 to 4 days after transduction was about 53%+8%, with comparable results for small-scale (24-well plates) and large-scale (T75 flasks) transduction (about 55±8% versus about 50%+10% in 6 and 4 experiments, respectively). Cell numbers contracted in the first 2 days following OKT3 activation such that only about 61%+12% (range of about 45% to 80%) of allodepleted cells were recovered on the day of transduction. Thereafter, the cells showed significant expansion, with a mean expansion in the range of about 94±46-fold (range of about 40 to about 153) over the subsequent 8 days, resulting in a net 58±33-fold expansion. Cell expansion in both small- and large-scale experiments was similar, with net expansion of about 45±29 fold (range of about 25 to about 90) in 5 small-scale experiments and about 79±34 fold (range of about 50 to about 116) in 3 large-scale experiments.

### ΔCD19 Enables Efficient and Selective Enrichment of Transduced Cells on Immunomagnetic Columns

[0520] The efficiency of suicide gene activation sometimes depends on the functionality of the suicide gene itself, and sometimes on the selection system used to enrich for gene-modified cells. The use of CD19 as a selectable marker was investigated to determine if CD19 selection enabled the selection of gene-modified cells with sufficient purity and yield, and whether selection had any deleterious effects on subsequent cell growth. Small-scale selection was performed according to manufacturer's instruction; however, it was determined that large-scale selection was optimum when 101 of CD19 microbeads was used per 1.3×10⁷ cells. FACS analysis was performed at 24 hours after immunomagnetic selection to minimize interference from anti-CD19 microbeads. The purity of the cells after immunomagnetic selection was consistently greater than 90%: mean percentage of CD19+ cells was in the range of about 98.3%±0.5% (n=5) in small-scale selections and in the range of about 97.4%+0.9% (n=3) in large-scale CliniMacs selections

[0521] The absolute yield of small- and large-scale selections were about 31%+11% and about 28%+6%, respectively; after correction for transduction efficiency. The mean recovery of transduced cells was about 54%+14% in small-scale and about 72%+18% in large-scale selections. The selection process did not have any discernable deleterious effect on subsequent cell expansion. In 4 experiments, the mean cell expansion over 3 days following CD19 immunomagnetic selection was about 3.5 fold for the CD19 positive fraction versus about 4.1 fold for non-selected transduced cells (p=0.34) and about 3.7 fold for non-transduced cells (p=0.75).

### Immunophenotype of Gene-Modified Allodepleted Cells

[0522] The final cell product (gene-modified allodepleted cells that had been cryopreserved 8 days after transduction) was immunophenotyped and was found to contain both CD4 and CD8 cells, with CD8 cells predominant, at 62%±11% CD8⁺ versus 23%±8% CD4⁺, as shown in the table below. NS=not significant, SD=standard deviation.

TABLE 1

| | Unmanipulated | Gene-modified | |
|---|---|---|---|
| | PBMC | allodepleted cells | |
| | (mean % ± SD) | (mean % ± SD) | |
| T cells: Total CD3+ | 82 ± 6 | 95 ± 6 | NS |
| CD3+ 4+ | 54 ± 5 | 23 ± 8 | p < 0.01 |
| CD3+ 8+ | 26 ± 9 | 62 ± 11 | p < 0.001 |
| NK cells: CD3− 56+ | 6 ± 3 | 2 ± 1 | NS |
| Memory phenotype | | | |
| CD45RA+ | 66 ± 3 | 10 ± 5 | p < 0.001 |
| CD45RO+ | 26 ± 2 | 78 ± 7 | p < 0.001 |
| CD45RA− CD62L+ | 19 ± 1 | 24 ± 7 | NS |
| CD45RA− CD62L− | 9 ± 1 | 64 ± 7 | p < 0.001 |
| CD27+ CD28+ | 67 ± 7 | 19 ± 9 | p < 0.001 |
| CD27+ CD28− | 7 ± 3 | 9 ± 4 | NS |
| CD27− CD28+ | 4 ± 1 | 19 ± 8 | p < 0.05 |
| CD27− CD28− | 22 ± 8 | 53 ± 18 | p < 0.05 |

[0523] The majorities of cells were CD45RO⁺ and had the surface immunophenotype of effector memory T cells. Expression of memory markers, including CD62L, CD27 and CD28, was heterogeneous. Approximately 24% of cells expressed CD62L, a lymph node-homing molecule predominantly expressed on central memory cells.

### Gene-Modified Allodepleted Cells Retained Antiviral Repertoire and Functionality

[0524] The ability of end-product cells to mediate antiviral immunity was assessed by interferon-ELISpot, cytotoxicity assay, and pentamer analysis. The cryopreserved gene-modified allodepleted cells were used in all analyses, since they were representative of the product currently being evaluated for use in a clinical study. Interferon-secretion in response to adenovirus, CMV or EBV antigens presented by donor cells was preserved although there was a trend towards reduced anti-EBV response in gene-modified allodepleted cells versus unmanipulated PBMC. The response to viral antigens was assessed by ELISpot in 4 pairs of unmanipulated PBMC and gene-modified allodepleted cells (GMAC). Adenovirus and CMV antigens were presented by donor-derived activated monocytes through infection with Ad5f35 null vector and Ad5f35-pp65 vector, respectively. EBV antigens were presented by donor EBV-LCL. The number of spot-forming units (SFU) was corrected for stimulator- and responder-alone wells. Only three of four donors were evaluable for CMV response, one seronegative donor was excluded.

[0525] Cytotoxicity was assessed using donor-derived EBV-LCL as targets. Gene-modified allodepleted cells that had undergone 2 or 3 rounds of stimulation with donor-derived EBV-LCL could efficiently lyse virus-infected autologous target cells Gene-modified allodepleted cells were stimulated with donor EBV-LCL for 2 or 3 cycles. ⁵¹Cr release assay was performed using donor-derived EBV-LCL and donor OKT3 blasts as targets. NK activity was blocked with 30-fold excess cold K562. The left panel shows results from 5 independent experiments using totally or partially mismatched donor-recipient pairs. The right panel shows results from 3 experiments using unrelated HLA haploidentical donor-recipient pairs. Error bars indicate standard deviation.

[0526] EBV-LCLs were used as antigen-presenting cells during selective allodepletion, therefore it was possible that EBV-specific T cells could be significantly depleted when the donor and recipient were haploidentical. To investigate this hypothesis, three experiments using unrelated HLA-haploidentical donor-recipient pairs were included, and the results showed that cytotoxicity against donor-derived EBV-LCL was retained. The results were corroborated by pentamer analysis for T cells recognizing HLA-B8-RAKFKQLL (SEQ ID NO: 287), an EBV lytic antigen (BZLF1) epitope, in two informative donors following allodepletion against HLA-B8 negative haploidentical recipients. Unmanipulated PBMC were used as comparators. The RAK-pentamer positive population was retained in gene-modified allodepleted cells and could be expanded following several rounds of in vitro stimulation with donor-derived EBV-LCL. Together, these results indicate that gene-modified allodepleted cells retained significant anti-viral functionality.

### Regulatory T Cells in the Gene-Modified Allodepleted Cell Population

[0527] Flow cytometry and functional analysis were used to determine whether regulatory T cells were retained in our allodepleted, gene modified, T cell product. A Foxp3⁺CD4⁺25⁺ population was found. Following immunomagnetic separation, the CD4⁺CD25⁺ enriched fraction demonstrated suppressor function when co-cultured with CFSE-labeled autologous PBMC in the presence of OKT3 and allogeneic feeders. Donor-derived PBMC was labeled with CFSE and stimulated with OKT3 and allogeneic feeders. CD4⁺CD25⁺ cells were immunomagnetically selected from the gene-modified cell population and added at 1:1 ratio to test wells. Flow cytometry was performed after 5 days. Gene-modified T cells were gated out by CD19 expression. The addition of CD4⁺CD25⁺ gene-modified cells (bottom panel) significantly reduced cell proliferation. Thus, allodepleted T cells may reacquire regulatory phenotype even after exposure to a CD25 depleting immunotoxin.

Gene-Modified Allodepleted Cells were Efficiently and Rapidly Eliminated by Addition of Chemical Inducer of Dimerization

[0528] The day following immunomagnetic selection, 10 nM of the chemical inducer of dimerization, AP20187, was added to induce apoptosis, which appeared within 24 hours. FACS analysis with annexin V and 7-AAD staining at 24 hours showed that only about 5.5%+2.5% of AP20187-treated cells remained viable, whereas about 81.0%+9.0% of untreated cells were viable. Killing efficiency after correction for baseline viability was about 92.9%+3.8%. Large-scale CD19 selection produced cells that were killed with similar efficiency as small-scale selection: mean viability with and without AP20187, and percentage killing, in large and small scale were about 3.9%, about 84.0%, about 95.4% (n=3) and about 6.6%, about 79.3%, about 91.4% (n=5) respectively. AP20187 was non-toxic to non-transduced cells: viability with and without AP20187 was about 86%±9% and 87%±8% respectively (n=6).

Transgene Expression and Function Decreased with Extended Culture but were Restored Upon Cell Reactivation

[0529] To assess the stability of transgene expression and function, cells were maintained in T cell culture medium and low dose IL-2 (50 U/ml) until 24 days after transduction. A portion of cells was then reactivated with OKT3/anti-CD28. CD19 expression was analyzed by flow cytometry 48 to 72 hours later, and suicide gene function was assessed by treatment with 10 nM AP20187. The obtained are for cells from day 5 post transduction (ie, 1 day after CD 19 selection) and day 24 post transduction, with or without 48-72 hours of reactivation (5 experiments). In 2 experiments, CD25 selection was performed after OKT3/αCD28 activation to further enrich activated cells. Error bars represent standard deviation. * indicates p<0.05 when compared to cells from day 5 post transduction. By day 24, surface CD19 expression fell from about 98%±1% to about 88%±4% (p<0.05) with a parallel decrease in mean fluorescence intensity (MFI) from 793±128 to 478±107 (p<0.05) (see FIG. 13B). Similarly, there was a significant reduction in suicide gene function: residual viability was 19.6±5.6% following treatment with AP20187; after correction for baseline viability of 54.8±20.9%, this equated to killing efficiency of only 63.1±6.2%.

[0530] To determine whether the decrease in transgene expression with time was due to reduced transcription following T cell quiescence or to elimination of transduced cells, a portion of cells were reactivated on day 22 post transduction with OKT3 and anti-CD28 antibody. At 48 to 72 hours (day 24 or 25 post transduction), OKT3/aCD28-reactivated cells had significantly higher transgene expression than non-reactivated cells. CD19 expression increased from about 88%±4% to about 93%±4% (p<0.01) and CD19 MFI increased from 478±107 to 643±174 (p<0.01). Additionally, suicide gene function also increased significantly from about a 63.1%±6.2% killing efficiency to about a 84.6%±8.0% (p<0.01) killing efficiency. Furthermore, killing efficiency was completely restored if the cells were immunomagnetically sorted for the activation marker CD25: killing efficiency of CD25 positive cells was about 93%. 2±1.2%, which was the same as killing efficiency on day 5 post transduction (93.1±3.5%). Killing of the CD25 negative fraction was 78.6±9.1%.

[0531] An observation of note was that many virus-specific T cells were spared when dimerizer was used to deplete gene-modified cells that have been re-activated with allogeneic PBMC, rather than by non-specific mitogenic stimuli. After 4 days reactivation with allogeneic cells, as shown in FIGS. 14A and 14B, treatment with AP20187 spares (and thereby enriches) viral reactive subpopulations, as measured by the proportion of T cells reactive with HLA pentamers specific for peptides derived from EBV and CMV. Gene-modified allodepleted cells were maintained in culture for 3 weeks post-transduction to allow transgene down-modulation. Cells were stimulated with allogeneic PBMC for 4 days, following which a portion was treated with 10 nM AP20187. The frequency of EBV-specific T cells and CMV-specific T cells were quantified by pentamer analysis before allostimulation, after allostimulation, and after treatment of allostimulated cells with dimerizer. The percentage of virus-specific T cells decreased after allostimulation. Following treatment with dimerizer, virus-specific T cells were partially and preferentially retained.

### DISCUSSION

[0532] The feasibility of engineering allogeneic T cells with two distinct safety mechanisms, selective allodepletion and suicide gene-modification has been demonstrated herein. In combination, these modifications can enhance and/or enable addback of substantial numbers of T cells with anti-viral and anti-tumor activity, even after haploidentical transplantation. The data presented herein show that the suicide gene, iCasp9, functions efficiently (>90% apoptosis after treatment with dimerizer) and that down-modulation of transgene expression that occurred with time was rapidly reversed upon T cell activation, as would occur when alloreactive T cells encountered their targets. Data presented herein also show that CD19 is a suitable selectable marker that enabled efficient and selective enrichment of transduced cells to >90% purity. Furthermore, the data presented herein indicate that these manipulations had no discernable effects on the immunological competence of the engineered T cells with retention of antiviral activity, and regeneration of a CD4⁺CD25⁺Foxp3⁺ population with Treg activity.

[0533] Given that the overall functionality of suicide genes depends on both the suicide gene itself and the marker used to select the transduced cells, translation into clinical use requires optimization of both components, and of the method used to couple expression of the two genes. The two most widely used selectable markers, currently in clinical practice, each have drawbacks. Neomycin phosphotransferase (neo) encodes a potentially immunogenic foreign protein and requires a 7-day culture in selection medium, which not only increases the complexity of the system, but is also potentially damaging to virus-specific T cells. A widely used surface selection marker, LNGFR, has recently had concerns raised, regarding its oncogenic potential and potential correlation with leukemia, in a mouse model, despite its apparent clinical safety. Furthermore, LNGFR selection is not widely available, because it is used almost exclusively in gene therapy. A number of alternative selectable markers have been suggested. CD34 has been well-studied in vitro, but the steps required to optimize a system configured primarily for selection of rare hematopoietic progenitors, and more critically, the potential for altered in vivo T cell homing, make CD34 sub-optimal for use as a selectable marker for a suicide switch expression construct. CD19 was chosen as an alternative selectable marker, since clinical grade CD19 selection is readily available as a method for B-cell depletion of stem cell autografts. The results presented herein demonstrated that CD19 enrichment could be performed with high purity and yield and, furthermore, the selection process had no discernable effect on subsequent cell growth and functionality.

[0534] The effectiveness of suicide gene activation in CD19-selected iCasp9 cells compared very favorably to that of neo- or LNGFR-selected cells transduced to express the HSVtk gene. The earlier generations of HSVtk constructs provided 80-90% suppression of ³H-thymidine uptake and showed similar reduction in killing efficiency upon extended in vitro culture, but were nonetheless clinically efficacious. Complete resolution of both acute and chronic GVHD has been reported with as little as 80% in vivo reduction in circulating gene-modified cells. These data support the hypothesis that transgene down-modulation seen in vitro is unlikely to be an issue because activated T cells responsible for GVHD will upregulate suicide gene expression and will therefore be selectively eliminated in vivo. Whether this effect is sufficient to allow retention of virus- and leukemia-specific T cells in vivo will be tested in a clinical setting. By combining in vitro selective allodepletion prior to suicide gene modification, the need to activate the suicide gene mechanism may be significantly reduced, thereby maximizing the benefits of addback T cell based therapies.

[0535] The high efficiency of iCasp9-mediated suicide seen in vitro has been replicated in vivo. In a SCID mouse-human xenograft model, more than 99% of iCasp9-modified T cells were eliminated after a single dose of dimerizer. AP1903, which has extremely close functional and chemical equivalence to AP20187, and currently is proposed for use in a clinical application, has been safety tested on healthy human volunteers and shown to be safe. Maximal plasma level of between about 10 ng/ml to about 1275 ng/ml AP1903 (equivalent to between about 7 nM to about 892 nM) was attained over a 0.01 mg/kg to 1.0 mg/kg dose range administered as a 2-hour intravenous infusion. There were substantially no significant adverse effects. After allowing for rapid plasma redistribution, the concentration of dimerizer used in vitro remains readily achievable in vivo.

[0536] Optimal culture conditions for maintaining the immunological competence of suicide gene-modified T cells must be determined and defined for each combination of safety switch, selectable marker and cell type, since phenotype, repertoire and functionality can all be affected by the stimulation used for polyclonal T cell activation, the method for selection of transduced cells, and duration of culture. The addition of CD28 co-stimulation and the use of cell-sized paramagnetic beads to generate gene modified-cells that more closely resemble unmanipulated PBMC in terms of CD4: CD8 ratio, and expression of memory subset markers including lymph node homing molecules CD62L and CCR7, may improve the in vivo functionality of gene-modified T cells. CD28 co-stimulation also may increase the efficiency of retroviral transduction and expansion. Interestingly however, the addition of CD28 co-stimulation was found to have no impact on transduction of allodepleted cells, and the degree of cell expansion demonstrated was higher when compared to the anti-CD3 alone arm in other studies. Furthermore, iCasp9-modified allodepleted cells retained significant anti-viral functionality, and approximately one fourth retained CD62L expression. Regeneration of CD4⁺CD25⁺Foxp3⁺ regulatory T cells was also seen. The allodepleted cells used as the starting material for T cell activation and transduction may have been less sensitive to the addition of anti-CD28 antibody as co-stimulation. CD25-depleted PBMC/EBV-LCL co-cultures contained T cells and B cells that already express CD86 at significantly higher level than unmanipulated PBMCs and may they provide co-stimulation. Depletion of CD25⁺ regulatory T cells prior to polyclonal T cell activation with anti-CD3 has been reported to enhance the immunological competence of the final T cell product. In order to minimize the effect of in vitro culture and expansion on functional competence, a relatively brief culture period was used in some experiments presented herein, whereby cells were expanded for a total of 8 days post-transduction with CD19-selection being performed on day 4.

[0537] Finally, scaled up production was demonstrated such that sufficient cell product can be produced to treat adult patients at doses of up to 10⁷ cells/kg: allodepleted cells can be activated and transduced at 4×10⁷ cells per flask, and a minimum of 8-fold return of CD19-selected final cell product can be obtained on day 8 post-transduction, to produce at least 3×10⁸ allodepleted gene-modified cells per original flask. The increased culture volume is readily accommodated in additional flasks or bags.

[0538] The allodepletion and iCasp9-modification presented herein may significantly improve the safety of adding back T cells, particularly after haploidentical stem cell allografts. This should in turn enable greater dose-escalation, with a higher chance of producing an anti-leukemia effect.

### Example 3: CASPALLO—Phase 1 Clinical Trial of Allodepleted T Cells Transduced with Inducible Caspase-9 Suicide Gene after Haploidentical Stem Cell Transplantation

[0539] This example presents results of a phase 1 clinical trial using the alternative suicide gene strategy illustrated in FIG. 2. Briefly, donor peripheral blood mononuclear cells were co-cultured with recipient irradiated EBV-transformed lymphoblastoid cells (40:1) for 72 hrs, allodepleted with a CD25 immunotoxin and then transduced with a retroviral supernatant carrying the iCasp9 suicide gene and a selection marker (ΔCD19); ΔCD19 allowed enrichment to >90% purity via immunomagnetic selection.

[0540] An example of a protocol for generation of a cell therapy product is provided herein.

### Source Material

[0541] Up to 240 ml (in 2 collections) of peripheral blood was obtained from the transplant donor according to established protocols. In some cases, dependent on the size of donor and recipient, a leukopheresis was performed to isolate sufficient T cells. 10 cc-30 cc of blood also was drawn from the recipient and was used to generate the Epstein Barr virus (EBV)-transformed lymphoblastoid cell line used as stimulator cells. In some cases, dependent on the medical history and/or indication of a low B cell count, the LCLs were generated using appropriate 1st degree relative (e.g., parent, sibling, or offspring) peripheral blood mononuclear cells.

### Generation of Allodepleted Cells

[0542] Allodepleted cells were generated from the transplant donors as presented herein. Peripheral blood mononuclear cells (PBMCs) from healthy donors were co-cultured with irradiated recipient Epstein Barr virus (EBV)-transformed lymphoblastoid cell lines (LCL) at responder-to-stimulator ratio of 40:1 in serum-free medium (AIM V; Invitrogen, Carlsbad, CA). After 72 hours, activated T cells that express CD25 were depleted from the co-culture by overnight incubation in RFT5-SMPT-dgA immunotoxin. Allodepletion is considered adequate if the residual CD3⁺CD25⁺ population was <1% and residual proliferation by 3H-thymidine incorporation was <10%.

### Retroviral Production

[0543] A retroviral producer line clone was generated for the iCasp9-CD19 construct. A master cell-bank of the producer also was generated. Testing of the master-cell bank was performed to exclude generation of replication competent retrovirus and infection by Mycoplasma, HIV, HBV, HCV and the like. The producer line was grown to confluency, supernatant harvested, filtered, aliquoted and rapidly frozen and stored at −80° C. Additional testing was performed on all batches of retroviral supernatant to exclude Replication Competent Retrovirus (RCR) and issued with a certificate of analysis, as per protocol.

### Transduction of Allodepleted Cells

[0544] Allodepleted T-lymphocytes were transduced using Fibronectin. Plates or bags were coated with recombinant Fibronectin fragment CH-296 (Retronectin™, Takara Shuzo, Otsu, Japan). Virus was attached to retronectin by incubating producer supernatant in coated plates or bags. Cells were then transferred to virus coated plates or bags. After transduction allodepleted T cells were expanded, feeding them with IL-2 twice a week to reach the sufficient number of cells as per protocol.

### CD19 Immunomagnetic Selection

[0545] Immunomagnetic selection for CD19 was performed 4 days after transduction. Cells are labeled with paramagnetic microbeads conjugated to monoclonal mouse anti-human CD19 antibodies (Miltenyi Biotech, Auburn, CA) and selected on a CliniMacs Plus automated selection device. Depending upon the number of cells required for clinical infusion cells were either cryopreserved after the CliniMacs selection or further expanded with IL-2 and cryopreserved on day 6 or day 8 post transduction.

### Freezing

[0546] Aliquots of cells were removed for testing of transduction efficiency, identity, phenotype and microbiological culture as required for final release testing by the FDA. The cells were cryopreserved prior to administration according to protocol.

### Study Drugs

### RFT5-SMPT-dgA

[0547] RFT5-SMPT-dgA is a murine IgG1 anti-CD25 (IL-2 receptor alpha chain) conjugated via a hetero—bifunctional crosslinker [N-succinimidyloxycarbonyl-alpha-methyl-d-(2-pyridylthio) toluene] (SMPT) to chemically deglycosylated ricin A chain (dgA). RFT5-SMPT-dgA is formulated as a sterile solution at 0.5 mg/ml.

### Synthetic Homodimerizer, AP1903

[0548] Mechanism of Action: AP1903-inducible cell death is achieved by expressing a chimeric protein comprising the intracellular portion of the human (Caspase-9 protein) receptor, which signals apoptotic cell death, fused to a drug-binding domain derived from human FK506-binding protein (FKBP). This chimeric protein remains quiescent inside cells until administration of AP1903, which cross-links the FKBP domains, initiating Caspase signaling and apoptosis.

[0549] Toxicology: AP1903 has been evaluated as an Investigational New Drug (IND) by the FDA and has successfully completed a phase 1 clinical safety study. No significant adverse effects were noted when API 903 was administered over a 0.01 mg/kg to 1.0 mg/kg dose range.

[0550] Pharmacology/Pharmacokinetics: Patients received 0.4 mg/kg of AP1903 as a 2 h infusion-based on published Pk data which show plasma concentrations of 10 ng/ml-1275 ng/ml over the 0.01 mg/kg to 1.0 mg/kg dose range with plasma levels falling to 18% and 7% of maximum at 0.5 and 2 hrs post dose.

[0551] Side Effect Profile in Humans: No serious adverse events occurred during the Phase 1 study in volunteers. The incidence of adverse events was very low following each treatment, with all adverse events being mild in severity. Only one adverse event was considered possibly related to AP1903. This was an episode of vasodilatation, presented as “facial flushing” for 1 volunteer at the 1.0 mg/kg AP1903 dosage. This event occurred at 3 minutes after the start of infusion and resolved after 32 minutes duration. All other adverse events reported during the study were considered by the investigator to be unrelated or to have improbable relationship to the study drug. These events included chest pain, flu syndrome, halitosis, headache, injection site pain, vasodilatation, increased cough, rhinitis, rash, gum hemorrhage, and ecchymosis.

[0552] Patients developing grade 1 GVHD were treated with 0.4 mg/kg AP1903 as a 2-hour infusion. Protocols for administration of AP1903 to patients grade 1 GVHD were established as follows. Patients developing GvHD after infusion of allodepleted T cells are biopsied to confirm the diagnosis and receive 0.4 mg/kg of AP1903 as a 2 h infusion. Patients with Grade I GVHD received no other therapy initially, however if they showed progression of GvHD conventional GvHD therapy was administered as per institutional guidelines. Patients developing grades 2-4 GVHD were administered standard systemic immunosuppressive therapy per institutional guidelines, in addition to the AP1903 dimerizer drug.

[0553] Instructions for preparation and infusion: AP1903 for injection is obtained as a concentrated solution of 2.33 ml in a 3-ml vial, at a concentration of 5 mg/ml, (i.e., 11.66 mg per vial). AP1903 may also be provided, for example, at 8 ml per vial, at 5 mg/ml. Prior to administration, the calculated dose was diluted to 100 mL in 0.9% normal saline for infusion. AP1903 for injection (0.4 mg/kg) in a volume of 100 ml was administered via IV infusion over 2 hours, using a non-DEHP, non-ethylene oxide sterilized infusion set and infusion pump.

[0554] The iCasp9 suicide gene expression construct (e.g., SFG.iCasp9.2A.ΔCD19), shown in FIG. 24 consists of inducible Caspase-9 (iCasp9) linked, via a cleavable 2A-like sequence, to truncated human CD19 (ΔCD19). iCasp9 includes a human FK506-binding protein (FKBP12; GenBank AH002 818) with an F36V mutation, connected via a Ser-Gly-Gly-Gly-Ser-Gly linker (SEQ ID NO: 289) to human Caspase-9 (CASP9; GenBank NM 001229). The F36V mutation may increase the binding affinity of FKBP12 to the synthetic homodimerizer, AP20187 or AP1903. The Caspase recruitment domain (CARD) has been deleted from the human Caspase-9 sequence and its physiological function has been replaced by FKBP12. The replacement of CARD with FKBP12 increases transgene expression and function. The 2A-like sequence encodes an 18 amino acid peptide from Thosea Asigna insect virus, which mediates >99% cleavage between a glycine and terminal proline residue, resulting in 17 extra amino acids in the C terminus of iCasp9, and one extra proline residue in the N terminus of CD19. ΔCD19 consists of full length CD19 (GenBank NM 001770) truncated at amino acid 333 (TDPTRRF (SEQ ID NO: 290)), which shortens the intracytoplasmic domain from 242 to 19 amino acids, and removes all conserved tyrosine residues that are potential sites for phosphorylation.

### In Vivo Studies

[0555] Three patients received iCasp9⁺ T cells after haplo-CD34⁺ stem cell transplantation (SCT), at dose levels between about 1×10⁶ to about 3×10⁶ cells/kg.

TABLE 2
Characteristics of the patients and clinical outcome.

| | | | | Days | Number | | |
|---|---|---|---|---|---|---|---|
| | | | Disease | from SCT | of cells | | |
| Patient | Sex (age | | status at | to T-cell | infused | Acute | Clinical |
| # | (yr)) | Diagnosis | SCT | infusion | per kg | GvHD | outcome |
| P1 | M(3) | MDS/AML | CR2 | 63 | 1 × 106 | Grade1/2 | Alive in |
| | | | | | | (skin, | CR >12 |
| | | | | | | liver) | months |
| | | | | | | | No GvHD |
| P2 | F(17) | B-ALL | CR2 | 80 and | (1 × 106)2 | Grade 1 | Alive in |
| | | | | 112 | | (skin) | CR >12 |
| | | | | | | | months |
| | | | | | | | No GvHD |
| P3 | M(8) | T-ALL | PIF/CR1 | 93 | 3 × 106 | None | Alive in |
| | | | | | | | CR >12 |
| | | | | | | | No GvHD |
| P4 | F(4) | T-ALL | Active | 30 | 3 × 106 | Grade 1 | Alive in |
| | | | disease | | | (skin) | CR >12 |
| | | | | | | | No GvHD |

[0556] Infused T cells were detected in vivo by flow cytometry (CD3⁺ΔCD19⁺) or qPCR as early as day 7 after infusion, with a maximum fold expansion of 170±5 (day 29±9 after infusion), as illustrated in FIGS. 27, 28, and 29. Two patients developed grade I/II aGVHD (see FIGS. 31-32) and AP1903 administration caused <90% ablation of CD3⁺ΔCD19⁺ cells, within 30 minutes of infusion (see FIGS. 30, 33, and 34), with a further log reduction within 24 hours, and resolution of skin and liver aGvHD within 24 hrs, showing that iCasp9 transgene was functional in vivo. For patient two, the disappearance of skin rash within 24 hours post treatment was observed.

TABLE 3
Patients with GvHD (dose level 1)

| | SCT to GvHD | T cells to GvHD | |
|---|---|---|---|
| Patient | (days) | (days) | GvHD (grade/site) |
| 1 | 77 | 14 | 2 (liver, skin) |
| 2 | 124 | 45/13 | 2 (skin) |

[0557] Ex vivo experiments confirmed this data. Furthermore, the residual allodepleted T cells were able to expand and were reactive to viruses (CMV) and fungi (Aspergillus fumigatus) (IFN-γ production). These in vivo studies found that a single dose of dimerizer drug can reduce or eliminate the subpopulation of T cells causing GvHD, but can spare virus specific CTLs, which can then re-expand.

### Immune Reconstitution

[0558] Depending on availability of patient cells and reagents, immune reconstitution studies (Immunophenotyping, T and B cell function) may be obtained at serial intervals after transplant. Several parameters measuring immune reconstitution resulting from iCaspase transduced allodepleted T cells will be analyzed. The analysis includes repeated measurements of total lymphocyte counts, T and CD19 B cell numbers, and FACS analysis of T cell subsets (CD3, CD4, CD8, CD16, CD19, CD27, CD28, CD44, CD62L, CCR7, CD56, CD45RA, CD45RO, alpha/beta and gamma/delta T cell receptors). Depending on the availability of a patient's T cells, T regulatory cell markers such as CD41, CD251, and FoxP3 also are analyzed. Approximately 10-60 ml of patient blood is taken, when possible, 4 hours after infusion, weekly for 1 month, monthly×9 months, and then at 1 and 2 years. The amount of blood taken is dependent on the size of the recipient and does not exceed 1-2 cc/kg in total (allowing for blood taken for clinical care and study evaluation) at any one blood draw.

### Persistence and Safety of Transduced Allodepleted T Cells

[0559] The following analysis was also performed on the peripheral blood samples to monitor function, persistence and safety of transduced T-cells at time-points indicated in the study calendar:

[0560] Phenotype by flow cytometry to detect the presence of transgenic cells.

[0561] RCR testing by PCR.

[0562] Quantitative real-time PCR for detecting retroviral integrants.

[0563] RCR testing by PCR is performed pre study, at 3, 6, and 12 months, and then yearly for a total of 15 years. Tissue, cell, and serum samples are archived for use in future studies for RCR as required by the FDA.

### Statistical Analysis and Stopping Rules.

[0564] The MTD is defined to be the dose which causes grade III/IV acute GVHD in at most 25% of eligible cases. The determination is based on a modified continual reassessment method (CRM) using a logistic model with a cohort of size 2. Three dose groups are being evaluated namely, 1×10⁶, 3×10⁶, 1×10⁷ with prior probabilities of toxicity estimated at 10%, 15%, and 30%, respectively. The proposed CRM design employs modifications to the original CRM by accruing more than one subject in each cohort, limiting dose escalation to no more than one dose level, and starting patient enrollment at the lowest dose level shown to be safe for non-transduced cells. Toxicity outcome in the lowest dose cohort is used to update the dose-toxicity curve. The next patient cohort is assigned to the dose level with an associated probability of toxicity closest to the target probability of 25%. This process continues until at least 10 patients have been accrued into this dose-escalation study. Depending on patient availability, at most 18 patients may be enrolled into the Phase 1 trial or until 6 patients have been treated at the current MTD. The final MTD will be the dose with probability closest to the target toxicity rate at these termination points.

[0565] Simulations were performed to determine the operating characteristics of the proposed design and compared this with a standard 3+3 dose-escalation design. The proposed design delivers better estimates of the MTD based on a higher probability of declaring the appropriate dose level as the MTD, afforded smaller number of patients accrued at lower and likely ineffective dose levels, and maintained a lower average total number of patients required for the trial. A shallow dose-toxicity curve is expected over the range of doses proposed herein and therefore accelerated dose-escalations can be conducted without comprising patient safety. The simulations performed indicate that the modified CRM design does not incur a larger average number of total toxicities when compared to the standard design (total toxicities equal to 1.9 and 2.1, respectively).

[0566] Grade III/IV GVHD that occurs within 45 days after initial infusion of allodepleted T cells will be factored into the CRM calculations to determine the recommended dose for the subsequent cohort. Real-time monitoring of patient toxicity outcome is performed during the study in order to implement estimation of the dose-toxicity curve and determine dose level for the next patient cohort using one of the pre-specified dose levels.

[0567] Treatment limiting toxicities will include:
[0568] grade 4 reactions related to infusion,
[0569] graft failure (defined as a subsequent decline in the ANC to <500/mm³ for three consecutive measurements on different days, unresponsive to growth factor therapy that persists for at least 14 days.) occurring within 30 days after infusion of TC-T grade 4 nonhematologic and noninfectious adverse events, occurring within 30 days after infusion grades 3-4 acute GVHD by 45 days after infusion of TC-T
[0570] treatment-related death occurring within 30 days after infusion
[0571] GVHD rates are summarized using descriptive statistics along with other measures of safety and toxicity. Likewise, descriptive statistics will be calculated to summarize the clinical and biologic response in patients who receive AP1903 due to great than Grade 1 GVHD.

[0572] Several parameters measuring immune reconstitution resulting from iCaspase transduced allodepleted T cells will be analyzed. These include repeated measurements of total lymphocyte counts, T and CD19 B cell numbers, and FACS analysis of T cell subsets (CD3, CD4, CDS, CD16, CD19, CD27, CD44, CD62L, CCR7, CD56, CD45RA, CD45RO, alpha/beta and gamma/delta T cell receptors). If sufficient T cells remain for analysis, T regulatory cell markers such as CD4/CD25/FoxP3 will also be analyzed. Each subject will be measured pre-infusion and at multiple time points post-infusion as presented above.

[0573] Descriptive summaries of these parameters in the overall patient group and by dose group as well as by time of measurement will be presented. Growth curves representing measurements over time within a patient will be generated to visualize general patterns of immune reconstitution. The proportion of iCasp9 positive cells will also be summarized at each time point. Pairwise comparisons of changes in these endpoints over time compared to pre-infusion will be implemented using paired t-tests or Wilcoxon signed-ranks test.

[0574] Longitudinal analysis of each repeatedly-measured immune reconstitution parameter using the random coefficients model will be performed. Longitudinal analysis allows construction of model patterns of immune reconstitution per patient while allowing for varying intercepts and slopes within a patient. Dose level as an independent variable in the model to account for the different dose levels received by the patients will also be used. Testing whether there is a significant improvement in immune function over time and estimates of the magnitude of these improvements based on estimates of slopes and its standard error will be possible using the model presented herein. Evaluation of any indication of differences in rates of immune reconstitution across different dose levels of CTLs will also be performed. The normal distribution with an identity link will be utilized in these models and implemented using SAS MIXED procedure. The normality assumption of the immune reconstitution parameters will be assessed and transformations (e.g. log, square root) can be performed, if necessary to achieve normality.

[0575] A strategy similar to the one presented above can be employed to assess kinetics of T cell survival, expansion and persistence. The ratio of the absolute T cell numbers with the number of marker gene positive cells will be determined and modeled longitudinally over time. A positive estimate of the slope will indicate increasing contribution of T cells for immune recovery. Virus-specific immunity of the iCasp9 T cells will be evaluated by analysis of the number of T cells releasing IFN gamma based on ex-vivo stimulation virus-specific CTLs using longitudinal models. Separate models will be generated for analysis of EBV, CMV and adenovirus evaluations of immunity.

[0576] Finally, overall and disease-free survival in the entire patient cohort will be summarized using the Kaplan-Meier product-limit method. The proportion of patients surviving and who are disease-free at 100 days and 1 year post-transplant can be estimated from the Kaplan-Meier curves.

[0577] In conclusion, addback of iCasp9⁺ allodepleted T cells after haplo CD34⁺ SCT allows a significant expansion of functional donor lymphocytes in vivo and a rapid clearance of alloreactive T cells with resolution of aGvHD.

### Example 4: In Vivo T Cell Allodepletion

[0578] The protocols provided in Examples 1-3 may also be modified to provide for in vivo T cell allodepletion. To extend the approach to a larger group of subjects who might benefit from immune reconstitution without acute GvHD, the protocol may be simplified, by providing for an in vivo method of T cell depletion. In the pre-treatment allodepletion method, as discussed herein, EBV-transformed lymphoblastoid cell lines are first prepared from the recipient, which then act as alloantigen presenting cells. This procedure can take up to 8 weeks, and may fail in extensively pre-treated subjects with malignancy, particularly if they have received rituximab as a component of their initial therapy. Subsequently, the donor T cells are co-cultured with recipient EBV-LCL, and the alloreactive T cells (which express the activation antigen CD25) are then treated with CD25-ricin conjugated monoclonal antibody. This procedure may take many additional days of laboratory work for each subject.

[0579] The process may be simplified by using an in vivo method of allodepletion, building on the observed rapid in vivo depletion of alloreactive T cells by dimerizer drug and the sparing of unstimulated but virus/fungus reactive T cells.

[0580] If there is development of Grade I or greater acute GvHD, a single dose of dimerizer drug is administered, for example at a dose of 0.4 mg/kg of AP1903 as a 2-hour intravenous infusion. Up to 3 additional doses of dimerizer drug may be administered at 48 hour intervals if acute GvHD persists. In subjects with Grade II or greater acute GvHD, these additional doses of dimerizer drug may be combined with steroids. For patients with persistent GVHD who cannot receive additional doses of the dimerizer due to a Grade Ill or IV reaction to the dimerizer, the patient may be treated with steroids alone, after either 0 or 1 doses of the dimerizer.

### Generation of Therapeutic T Cells

[0581] Up to 240 ml (in 2 collections) of peripheral blood is obtained from the transplant donor according to the procurement consent. If necessary, a leukapheresis is used to obtain sufficient T cells; (either prior to stem cell mobilization or seven days after the last dose of G-CSF). An extra 10-30 mls of blood may also be collected to test for infectious diseases such as hepatitis and HIV.

[0582] Peripheral blood mononuclear cells are be activated using anti-human CD3 antibody (e.g. from Orthotech or Miltenyi) on day 0 and expanded in the presence of recombinant human interleukin-2 (rhIL-2) on day 2. CD3 antibody-activated T cells are transduced by the iCaspase-9 retroviral vector on flasks or plates coated with recombinant Fibronectin fragment CH-296 (Retronectin™, Takara Shuzo, Otsu, Japan). Virus is attached to retronectin by incubating producer supernatant in retronectin coated plates or flasks. Cells are then transferred to virus coated tissue culture devices. After transduction T cells are expanded by feeding them with rhIL-2 twice a week to reach the sufficient number of cells as per protocol.

[0583] To ensure that the majority of infused T cells carry the suicide gene, a selectable marker, truncated human CD19 (ΔCD19) and a commercial selection device, may be used to select the transduced cells to >90% purity. Immunomagnetic selection for CD19 may be performed 4 days after transduction. Cells are labeled with paramagnetic microbeads conjugated to monoclonal mouse anti-human CD19 antibodies (Miltenyi Biotech, Auburn, CA) and selected on a CliniMacs Plus automated selection device. Depending upon the number of cells required for clinical infusion cells might either be cryopreserved after the CliniMacs selection or further expanded with IL-2 and cryopreserved as soon as sufficient cells have expanded (up to day 14 from product initiation).

[0584] Aliquots of cells may be removed for testing of transduction efficiency, identity, phenotype, autonomous growth and microbiological examination as required for final release testing by the FDA. The cells are cryopreserved prior to administration.

### Administration of T Cells

[0585] The transduced T cells are administered to patients from, for example, between 30 and 120 days following stem cell transplantation. The cryopreserved T cells are thawed and infused through a catheter line with normal saline. For children, premedications are dosed by weight. Doses of cells may range from, for example, from about 1×10⁴ cells/kg to 1×10⁸ cells/kg, for example from about 1×10⁵ cells/kg to 1×10⁷ cells/kg, from about 1×10⁶ cells/kg to 5×10⁶ cells/kg, from about 1×10⁴ cells/kg to 5×10⁶ cells/kg, for example, about 1×10⁴, about 1×10⁵, about 2×10⁵, about 3×10⁵, about 5×10⁵, 6×10⁵, about 7×10⁵, about 8×10⁵, about 9×10⁵, about 1×10⁶, about 2×10⁶, about 3×10⁶, about 4×10⁶, or about 5×10⁶ cells/kg.

### Treatment of GvHD

[0586] Patients who develop grade ≥1 acute GVHD are treated with 0.4 mg/kg AP1903 as a 2-hour infusion. AP1903 for injection may be provided, for example, as a concentrated solution of 2.33 ml in a 3 ml vial, at a concentration of 5 mg/ml, (i.e 11.66 mg per vial). AP1903 may also provided in different sized vials, for example, 8 ml at 5 mg/ml may be provided. Prior to administration, the calculated dose will be diluted to 100 mL in 0.9% normal saline for infusion. AP1903 for Injection (0.4 mg/kg) in a volume of 100 ml may be administered via IV infusion over 2 hours, using a non-DEHP, non-ethylene oxide sterilized infusion set and an infusion pump.

TABLE 4
Sample treatment schedule

| Time | Donor | Recipient |
|---|---|---|
| Pre-transplant | Obtain up to 240 of blood or | |
| | unstimulated leukapheresis | |
| | from bone marrow transplant | |
| | donor. Prepare T cells and | |
| | donor LCLs for later immune | |
| | reconstitution studies. | |
| Day 0 | Anti-CD3 activation of PBMC | |
| Day 2 | IL-2 feed | |
| Day 3 | Transduction | |
| Day 4 | Expansion | |
| Day 6 | CD19 selection. | |
| | Cryopreservation (*if | |
| | required dose is met) | |
| Day 8 | Assess transduction | |
| | efficiency and iCaspase9 | |
| | transgene functionality by | |
| | phenotype. Cryopreservation | |
| | (*if not yet performed) | |
| Day 10 or Day 12 to Day 14 | Cryopreservation (if not yet | |
| | performed) | |
| From 30 to 120 days post- | | Thaw and infuse T cells 30 to |
| transplant | | 120 days post-stem cell |
| | | infusion. |

[0587] Other methods may be followed for clinical therapy and assessment as provided in, for example, Examples 1-3 herein.

### Example 5: Using the iCasp9 Suicide Gene to Improve the Safety of Mesenchymal Stromal Cell Therapies

[0588] Mesenchymal stromal cells (MSCs) have been infused into hundreds of patients to date with minimal reported deleterious side effects. The long term side effects are not known due to limited follow-up and a relatively short time since MSCs have been used in treatment of disease. Several animal models have indicated that there exists the potential for side effects, and therefore a system allowing control over the growth and survival of MSCs used therapeutically is desirable. The inducible Caspase-9 suicide switch expression vector construct presented herein was investigated as a method of eliminating MSC's in vivo and in vitro.

### Materials and Methods

### MSC Isolation

[0589] MSCs were isolated from healthy donors. Briefly, post-infusion discarded healthy donor bone marrow collection bags and filters were washed with RPMI 1640 (HyClone, Logan, UT) and plated on tissue culture flasks in DMEM (Invitrogen, Carlsbad, CA) with 10% fetal bovine serum (FBS), 2 mM alanyl-glutamine (Glutamax, Invitrogen), 100 units/mL penicillin and 100 μg/mL streptomycin (Invitrogen). After 48 hours, the supernatant was discarded and the cells were cultured in complete culture medium (CCM): α-MEM (Invitrogen) with 16.5% FBS, 2 mM alanyl-glutamine, 100 units/mL penicillin and 100 μg/mL streptomycin. Cells were grown to less then 80% confluence and replated at lower densities as appropriate.

### Immunophenotyping

[0590] Phycoerythrin (PE), fluorescein isothiocyanate (FITC), peridinin chlorophyll protein (PerCP) or allophycocyanin (APC)-conjugated CD14, CD34, CD45, CD73, CD90, CD105 and CD133 monoclonal antibodies were used to stain MSCs. All antibodies were from Becton Dickinson-Pharmingen (San Diego, CA), except where indicated. Control samples labeled with an appropriate isotype-matched antibody were included in each experiment. Cells were analyzed by fluorescence-activated cell sorting FACScan (Becton Dickinson) equipped with a filter set for 4 fluorescence signals.

### Differentiation Studies In Vitro

[0591] Adipocytic differentiation. MSCs (7.5×10⁴ cells) were plated in wells of 6-well plates in NH AdipoDiff Medium (Miltenyi Biotech, Auburn, CA). Medium was changed every third day for 21 days. Cells were stained with Oil Red O solution (obtained by diluting 0.5% w/v Oil Red O in isopropanol with water at a 3:2 ratio), after fixation with 4% formaldehyde in phosphate buffered saline (PBS).

[0592] Osteogenic differentiation. MSCs (4.5×10⁴ cells) were plated in 6-well plates in NH OsteoDiff Medium (Miltenyi Biotech). Medium was changed every third day for 10 days. Cells were stained for alkaline phosphatase activity using Sigma Fast BCIP/NBT substrate (Sigma-Aldrich, St. Louis, MO) as per manufacturer instructions, after fixation with cold methanol.

[0593] Chondroblastic differentiation. MSC pellets containing 2.5×10⁵ to 5×10⁵ cells were obtained by centrifugation in 15 mL or 1.5 mL polypropylene conical tubes and cultured in NH ChondroDiff Medium (Miltenyi Biotech). Medium was changed every third day for a total of 24 days. Cell pellets were fixed in 4% formalin in PBS and processed for routine paraffin sectioning. Sections were stained with alcian blue or using indirect immunofluorescence for type II collagen (mouse anti-collagen type II monoclonal antibody MAB8887, Millipore, Billerica, MA) after antigen retrieval with pepsin (Thermo Scientific, Fremont, CA).

iCasp9-ΔCD19 Retrovirus Production and Transduction of MSCs

[0594] The SFG.iCasp9.2A.ΔCD19 (iCasp-ΔCD19) retrovirus consists of iCasp9 linked, via a cleavable 2A-like sequence, to truncated human CD19 (ΔCD19). As noted above, iCasp9 is a human FK506-binding protein (FKBP12) with an F36V mutation, which increases the binding affinity of the protein to a synthetic homodimerizer (AP20187 or AP1903), connected via a Ser-Gly-Gly-Gly-Ser-Gly linker (SEQ ID NO: 289) to human Caspase-9, whose recruitment domain (CARD) has been deleted, its function replaced by FKBP12.

[0595] The 2A-like sequence encodes a 20 amino acid peptide from Thosea Asigna insect virus, which mediates more than 99% cleavage between a glycine and terminal proline residue, to ensure separation of iCasp9 and ΔCD19 upon translation. ΔCD19 consists of human CD19 truncated at amino acid 333, which removes all conserved intracytoplasmic tyrosine residues that are potential sites for phosphorylation. A stable PG13 clone producing Gibbon ape leukemia virus (Gal-V) pseudotyped retrovirus was made by transiently transfecting Phoenix Eco cell line (ATCC product #SD3444; ATCC, Manassas, VA) with SFG.iCasp9.2A.ΔCD19, which yielded Eco-pseudotyped retrovirus. The PG13 packaging cell line (ATCC) was transduced 3 times with Eco-pseudotyped retrovirus to generate a producer line that contained multiple SFG.iCasp9.2A.ΔCD19 proviral integrants per cell. Single-cell cloning was performed, and the PG13 clone that produced the highest titer was expanded and used for vector production. Retroviral supernatant was obtained via culture of the producer cell lines in IMDM (Invitrogen) with 10% FBS, 2 mM alanyl-glutamine, 100 units/mL penicillin and 100 μg/mL streptomycin. Supernatant containing the retrovirus was collected 48 and 72 hours after initial culture. For transduction, approximately 2×10⁴ MSCs/cm² were plated in CM in 6-well plates, T75 or T175 flasks. After 24 hours, medium was replaced by viral supernatant diluted 10-fold together with polybrene (final concentration 5 μg/mL) and the cells were incubated at 37° C. in 5% CO₂ for 48 hours, after which cells were maintained in complete medium.

### Cell Enrichment

[0596] For inducible iCasp9-ΔCD19-positive MSC selection for in vitro experiments, retrovirally transduced MSC were enriched for CD19-positive cells using magnetic beads (Miltenyi Biotec) conjugated with anti-CD19 (clone 4G7), per manufacturer instructions. Cell samples were stained with PE- or APC-conjugated CD19 (clone SJ25C1) antibody to assess the purity of the cellular fractions.

### Apoptosis Studies In Vitro

[0597] Undifferentiated MSCs. The chemical inducer of dimerization (CID) (AP20187; ARIAD Pharmaceuticals, Cambridge, MA) was added at 50 nM to iCasp9-transduced MSCs cultures in complete medium. Apoptosis was evaluated 24 hours later by FACS analysis, after cell harvest and staining with annexin V-PE and 7-AAD in annexin V binding buffer (BD Biosciences, San Diego, CA). Control iCasp9-transduced MSCs were maintained in culture without exposure to CID.

[0598] Differentiated MSCs. Transduced MSCs were differentiated as presented above. At the end of the differentiation period, CID was added to the differentiation media at 50 nM. Cells were stained appropriately for the tissue being studied, as presented above, and a contrast stain (methylene azur or methylene blue) was used to evaluate the nuclear and cytoplasmic morphology. In parallel, tissues were processed for terminal deoxynucleotidyl-transferase dUTP nick end labeling (TUNEL) assay as per manufacturer instructions (In Situ Cell Death Detection Kit, Roche Diagnostics, Mannheim, Germany). For each time point, four random fields were photographed at a final magnification of 40× and the images were analyzed with ImageJ software version 1.430 (NIH, Bethesda, MD). Cell density was calculated as the number of nuclei (DAPI positivity) per unit of surface area (in mm²). The percentage of apoptotic cells was determined as the ratio of the number of nuclei with positive TUNEL signal (FITC positivity) to the total number of nuclei. Controls were maintained in culture without CID.

### In Vivo Killing Studies in Murine Model

[0599] All mouse experiments were performed in accordance with the Baylor College of Medicine animal husbandry guidelines. To assess the persistence of modified MSCs in vivo, a SCID mouse model was used in conjunction with an in vivo imaging system. MSCs were transduced with retroviruses coding for the enhanced green fluorescent protein-firefly luciferase (eGFP-FFLuc) gene alone or together with the iCasp9-ΔCD19 gene. Cells were sorted for eGFP positivity by fluorescence activated cell sorting using a MoFlo flow cytometer (Beckman Coulter, Fullerton, CA). Doubly transduced cells were also stained with PE-conjugated anti-CD19 and sorted for PE-positivity. SCID mice (8-10 weeks old) were injected subcutaneously with 5×10⁵ MSCs with and without iCasp9-ΔCD19 in opposite flanks. Mice received two intraperitoneal injections of 50 μg of CID 24 hours apart starting a week later. For in vivo imaging of MSCs expressing eGFP-FFLuc, mice were injected intraperitoneally with D-luciferin (150 mg/kg) and analyzed using the Xenogen-IVIS Imaging System. Total luminescence (a measurement proportional to the total labeled MSCs deposited) at each time point was calculated by automatically defining regions-of-interest (ROIs) over the MSC implantation sites. These ROIs included all areas with luminescence signals at least 5% above background. Total photon counts were integrated for each ROI and an average value calculated. Results were normalized so that time zero would correspond to 100% signal.

[0600] In a second set of experiments, a mixture of 2.5×10⁶ eGFP-FFLuc-labeled MSCs and 2.5×10⁶ eGFP-FFLuc-labeled, iCasp9-ΔCD19-transduced MSCs was injected subcutaneously in the right flank, and the mice received two intraperitoneal injections of 50 μg of CID 24 h apart starting 7 days later. At several time points after CID injection, the subcutaneous pellet of MSCs was harvested using tissue luminescence to identify and collect the whole human specimen and to minimize mouse tissue contamination. Genomic DNA was then isolated using QIAmp® DNA Mini (Qiagen, Valencia, CA). Aliquots of 100 ng of DNA were used in a quantitative PCR (qPCR) to determine the number of copies of each transgene using specific primers and probes (for the eGFP-FFLuc construct: forward primer 5′-TCCGCCCTGAGCAAAGAC-3′ (SEQ ID NO: 291), reverse 5′-ACGAACTCCAGCAGGACCAT-3′ (SEQ ID NO: 292), probe 5′ FAM, 6-carboxyfluorescein-ACGAGAAGCGCGATC-3′ MGBNFQ (SEQ ID NO: 293), minor groove binding non-fluorescent quencher; iCasp9-ΔCD19: forward 5′-CTGGAATCTGGCGGTGGAT-3′ (SEQ ID NO: 294), reverse 5′-CAAACTCTCAAGAGCACCGACAT-3′ (SEQ ID NO: 295), probe 5′ FAM-CGGAGTCGACGGATT-3′ MGBNFQ (SEQ ID NO: 296)). Known numbers of plasmids containing single copies of each transgene were used to establish standard curves. It was determined that approximately 100 ng of DNA isolated from “pure” populations of singly eGFP-FFLuc- or doubly eGFP-FFLuc- and iCasp9-transduced MSCs had similar numbers of eGFP-FFLuc gene copies (approximately 3.0×10⁴), as well as zero and 1.7×10³ of iCasp9-ΔCD19 gene copies, respectively.

[0601] Untransduced human cells and mouse tissues had zero copies of either gene in 100 ng of genomic DNA. Because the copy number of the eGFP gene is the same on identical amounts of DNA isolated from either population of MSCs (iCasp9-negative or positive), the copy number of this gene in DNA isolated from any mixture of cells will be proportional to the total number of eGFP-FFLuc-positive cells (iCasp9-positive plus negative MSCs). Moreover, because iCasp9-negative tissues do not contribute to the iCasp9 copy number, the copy number of the iCasp9 gene in any DNA sample will be proportional to the total number of iCasp9-positive cells.

[0602] Therefore, if G is the total number of GFP-positive and iCasp9-negative cells and C the total number of GFP-positive and iCasp9-positive cells, for any DNA sample then N_{eGFP}=g·(C+G) and N_{icasp9}=k·C, where N represents gene copy number and g and k are constants relating copy number and cell number for the eGFP and iCasp9 genes, respectively. Thus N_{icasp9}/N_{eGFP}=(k/g)·[C/(C+G)], i.e., the ratio between iCasp9 copy number and eGFP copy number is proportional to the fraction of doubly transduced (iCasp9-positive) cells among all eGFP positive cells. Although the absolute values of N_{icasp9} and N_{eGFP} will decrease with increasing contamination by murine cells in each MSC explant, for each time point the ratio will be constant regardless of the amount of murine tissue included, since both types of human cells are physically mixed. Assuming similar rates of spontaneous apoptosis in both populations (as documented by in vitro culture) the quotient between N_{icasp9}/N_{eGFP} at any time point and that at time zero will represent the percentage of surviving iCasp9-positive cells after exposure to CID. All copy number determinations were done in triplicate.

### Statistical Analysis

[0603] Paired 2-tailed Student's t-test was used to determine the statistical significance of differences between samples. All numerical data are represented as mean±1 standard deviation.

### Results

MSCs are Readily Transduced with iCasp9-ΔCD19 and Maintain their Basic Phenotype

[0604] Flow cytometric analysis of MSCs from 3 healthy donors showed they were uniformly positive for CD73, CD90 and CD105 and negative for the hematopoietic markers CD45, CD14, CD133 and CD34. The mononuclear adherent fraction isolated from bone marrow was homogenously positive for CD73, CD90 and CD105 and negative for hematopoietic markers. The differentiation potential, of isolated MSCs, into adipocytes, osteoblasts and chondroblasts was confirmed in specific assays, demonstrating that these cells are bona fide MSCs.

[0605] Early passage MSCs were transduced with an iCasp9-ΔCD19 retroviral vector, encoding an inducible form of Caspase-9. Under optimal single transduction conditions, 47±6% of the cells expressed CD19, a truncated form of which is transcribed in cis with iCasp9, serving as a surrogate for successful transduction and allowing selection of transduced cells. The percentage of cells positive for CD19 was stable for more than two weeks in culture, suggesting no deleterious or growth advantageous effects of the construct on MSCs. The percentage of CD19-positive cells, a surrogate for successful transduction with iCasp9, remains constant for more than 2 weeks. To further address the stability of the construct, a population of iCasp9-positive cells purified by a fluorescence activated cell sorter (FACS) was maintained in culture: no significant difference in the percentage of CD19-positive cells was observed over six weeks (96.5±1.1% at baseline versus 97.4±0.8% after 43 days, P=0.46). The phenotype of the iCasp9-CD19-positive cells was otherwise substantially identical to that of untransduced cells, with virtually all cells positive for CD73, CD90 and CD105 and negative for hematopoietic markers, confirming that the genetic manipulation of MSCs did not modify their basic characteristics.

iCasp9-ΔCD19 Transduced MSCs Undergo Selective Apoptosis after Exposure to CID In Vitro

[0606] The proapoptotic gene product iCasp9 can activated by a small chemical inducer of dimerization (CID), AP20187, an analogue of tacrolimus that binds the FK506-binding domain present in the iCasp9 product. Non-transduced MSCs have a spontaneous rate of apoptosis in culture of approximately 18% (+7%) as do iCasp9-positive cells at baseline (15±6%, P=0.47). Addition of CID (50 nM) to MSC cultures after transduction with iCasp9-ΔCD19 results in the apoptotic death of more than 90% of iCasp9-positive cells within 24 hrs (93±1%, P<0.0001), while iCasp9-negative cells retain an apoptosis index similar to that of non-transduced controls (20±7%, P=0.99 and P=0.69 vs. non-transduced controls with or without CID respectively) (see FIGS. 17A and 70B). After transduction of MSCs with iCasp9, the chemical inducer of dimerization (CID) was added at 50 nM to cultures in complete medium. Apoptosis was evaluated 24 hours later by FACS analysis, after cell harvest and staining with annexin V-PE and 7-AAD. Ninety-three percent of the iCasp9-CD19-positive cells (iCasp pos/CID) became annexin positive versus only 19% of the negative population (iCasp neg/CID), a proportion comparable to non-transduced control MSC exposed to the same compound (Control/CID, 15%) and to iCasp9-CD19-positive cells unexposed to CID (iCasp pos/no CID, 13%), and similar to the baseline apoptotic rate of non-transduced MSCs (Control/no CID, 16%). Magnetic immunoselection of iCap9-CD19-positive cells can be achieved to high degree of purity. More than 95% of the selected cells become apoptotic after exposure to CID.

[0607] Analysis of a highly purified iCasp9-positive population at later time points after a single exposure to CID shows that the small fraction of iCasp9-negative cells expands and that a population of iCasp9-positive cells remains, but that the latter can be killed by re-exposure to CID. Thus, no iCasp9-positive population resistant to further killing by CID was detected. A population of iCasp9-CD19-negative MSCs emerges as early as 24 hours after CID introduction. A population of iCasp9-CD19-negative MSCs is expected since achieving a population with 100% purity is unrealistic and because the MSCs are being cultured in conditions that favor their rapid expansion in vitro. A fraction of iCasp9-CD19-positive population persists, as predicted by the fact that killing is not 100% efficient (assuming, for example, 99% killing of a 99% pure population, the resulting population would have 49.7% iCasp9-positive and 50.3% iCasp9-negative cells). The surviving cells, however, can be killed at later time points by re-exposure to CID.

iCasp9-ΔCD19 Transduced MSCs Maintain the Differentiation Potential of Unmodified MSCs and their Progeny is Killed by Exposure to CID

[0608] To determine if the CID can selectively kill the differentiated progeny of iCasp9-positive MSCs, immunomagnetic selection for CD19 was used to increase the purity of the modified population (>90% after one round of selection. The iCasp9-positive cells thus selected were able to differentiate in vivo into all connective tissue lineages studied (see FIGS. 19A-19Q). Human MSCs were immunomagnetically selected for CD19 (thus iCasp9) expression, with a purity greater than 91%. After culture in specific differentiation media, iCasp9-positive cells were able to give rise to adipocytic (A, oil red and methylene azur), osteoblastic (B, alkaline phosphatase-BCIP/NBT and methylene blue) and chondroblastic lineages (C, alcian blue and nuclear red) lineages. These differentiated tissues are driven to apoptosis by exposure to 50 nM CID (D-N). Note numerous apoptotic bodies (arrows), cytoplasmic membrane blebbing (inset) and loss of cellular architecture (D and E); widespread TUNEL positivity in chondrocytic nodules (F-H), and adipogenic (I-K) and osteogenic (L-N) cultures, in contrast to that seen in untreated iCasp9-transduced controls (adipogenic condition shown, O-Q) (F, I, L, O, DAPI; G, J, M, P, TUNEL-FITC; H, K, N, Q, overlay).

[0609] After 24 hours of exposure to 50 nM of CID, microscopic evidence of apoptosis was observed with membrane blebbing, cell shrinkage and detachment, and presence of apoptotic bodies throughout the adipogenic and osteogenic cultures. A TUNEL assay showed widespread positivity in adipogenic and osteogenic cultures and the chondrocytic nodules (see FIGS. 19A-19Q), which increased over time. After culture in adipocytic differentiation media, iCasp9-positive cells gave rise to adipocytes. After exposure to 50 nM CID, progressive apoptosis was observed as evidenced by an increasing proportion of TUNEL-positive cells. After 24 hours, there was a significant decrease in cell density (from 584 cells/mm² to <14 cells/mm²), with almost all apoptotic cells having detached from the slides, precluding further reliable calculation of the proportion of apoptotic cells. Thus, iCasp9 remained functional even after MSC differentiation, and its activation results in the death of the differentiated progeny.

iCasp9-ΔCD19 Transduced MSCs Undergo Selective Apoptosis after In Vivo Exposure to CID

[0610] Although intravenously injected MSC already appear to have a short in vivo survival time, cells injected locally may survive longer and produce correspondingly more profound adverse effects. To assess the in vivo functionality of the iCasp9 suicide system in such a setting, SCID mice were subcutaneously injected with MSCs. MSCs were doubly transduced with the eGFP-FFLuc (previously presented) and iCasp9-ΔCD19 genes. MSCs were also singly transduced with eGFP-FFLuc. The eGFP-positive (and CD19-positive, where applicable) fractions were isolated by fluorescence activated cell sorting, with a purity >95%. Each animal was injected subcutaneously with iCasp9-positive and control MSCs (both eGFP-FFLuc-positive) in opposite flanks. Localization of the MSCs was evaluated using the Xenogen-IVIS Imaging System. In another set of experiments, a 1:1 mixture of singly and doubly transduced MSCs was injected subcutaneously in the right flank and the mice received CID as above. The subcutaneous pellet of MSCs was harvested at different time points, genomic DNA was isolated and qPCR was used to determine copy numbers of the eGFP-FFLuc and iCasp9-ΔCD19 genes. Under these conditions, the ratio of the iCasp9 to eGFP gene copy numbers is proportional to the fraction of iCasp9-positive cells among total human cells (see Methods above for details). The ratios were normalized so that time zero corresponds to 100% of iCasp9-positive cells. Serial examination of animals after subcutaneous inoculation of MSCs (prior to CID injection) shows evidence of spontaneous apoptosis in both cell populations (as demonstrated by a fall in the overall luminescence signal to ˜20% of the baseline). This has been previously observed after systemic and local delivery of MSCs in xenogeneic models.

[0611] The luminescence data showed a substantial loss of human MSCs over the first 96 h after local delivery of MSCs, even before administration of CID, with only approximately 20% cells surviving after one week. From that time point onward, however, there were significant differences between the survival of icasp9-positive MSCs with and without dimerizer drug. Seven days after MSC implantation, animals were given two injections of 50 μg of CID, 24 hours apart. MSCs transduced with iCasp9 were quickly killed by the drug, as demonstrated by the disappearance of their luminescence signal. Cells negative for iCasp9 were not affected by the drug. Animals not injected with the drug showed persistence of signal in both populations up to a month after MSC implantation. To further quantify cell killing, qPCR assays were developed to measure copy numbers of the eGFP-FFLuc and iCasp9-ΔCD19 genes. Mice were injected subcutaneously with a 1:1 mixture of doubly and singly transduced MSCs and administered CID as above, one week after MSC implantation. MSCs explants were collected at several time points, genomic DNA isolated from the samples and qPCR assays performed on substantially identical amounts of DNA. Under these conditions (see Methods), at any time point, the ratio of iCasp9-ΔCD19 to eGFP-FFLuc copy numbers is proportional to the fraction of viable iCasp9-positive cells. Progressive killing of iCasp9-positive cells was observed (>99%) so that the proportion of surviving iCasp9-positive cells was reduced to 0.7% of the original population after one week. Therefore, MSCs transduced with iCasp9 can be selectively killed in vivo after exposure to CID, but otherwise persist.

### DISCUSSION

[0612] The feasibility of engineering human MSCs to express a safety mechanism using an inducible suicide protein is demonstrated herein. The date presented herein show that MSC can be readily transduced with the suicide gene iCasp9 coupled to the selectable surface maker CD19. Expression of the co-transduced genes is stable both in MSCs and their differentiated progeny, and does not evidently alter their phenotype or potential for differentiation. These transduced cells can be killed in vitro and in vivo when exposed to the appropriate small molecule chemical inducer of dimerization that binds to the iCasp9.

[0613] For a cell based therapy to be successful, transplanted cells must survive the period between their harvest and their ultimate in vivo clinical application. Additionally, a safe cell based therapy also should include the ability to control the unwanted growth and activity of successfully transplanted cells. Although MSCs have been administered to many patients without notable side effects, recent reports indicate additional protections, such as the safety switch presented herein, may offer additional methods of control over cell based therapies as the potential of transplanted MSC to be genetically and epigenetically modified to enhance their functionality, and to differentiate into lineages including bone and cartilage is further investigated and exploited. Subjects receiving MSCs that have been genetically modified to release biologically active proteins might particularly benefit from the added safety provided by a suicide gene.

[0614] The suicide system presented herein offers several potential advantages over other known suicide systems. Strategies involving nucleoside analogues, such as those combining Herpes Simplex Virus thymidine kinase (HSV-tk) with gancyclovir (GCV) and bacterial or yeast cytosine deaminase (CD) with 5-fluoro-cytosine (5-FC), are cell-cycle dependent and are unlikely to be effective in the post-mitotic tissues that may be formed during the application of MSCs to regenerative medicine. Moreover, even in proliferating tissues the mitotic fraction does not comprise all cells, and a significant portion of the graft may survive and remain dysfunctional. In some instance, the prodrugs required for suicide may themselves have therapeutic uses that are therefore excluded (e.g., GCV), or may be toxic (e.g., 5-FC), either as a result of their metabolism by non-target organs (e.g., many cytochrome P450 substrates), or due to diffusion to neighboring tissues after activation by target cells (e.g., CB1954, a substrate for bacterial nitroreductase).

[0615] In contrast, the small molecule chemical inducers of dimerization presented herein have shown no evidence of toxicities even at doses ten fold higher than those required to activate the iCasp9. Additionally, nonhuman enzymatic systems, such as HSV-tk and DC, carry a high risk of destructive immune responses against transduced cells. Both the iCasp9 suicide gene and the selection marker CD19, are of human origin, and thus should be less likely to induce unwanted immune responses. Although linkage of expression of the selectable marker to the suicide gene by a 2A-like cleavable peptide of nonhuman origin could pose problems, the 2A-like linker is 20 amino acids long, and is likely less immunogenic than a nonhuman protein. Finally, the effectiveness of suicide gene activation in iCasp9-positive cells compares favorably to killing of cells expressing other suicide systems, with 90% or more of iCasp9-modified T cells eliminated after a single dose of dimerizer, a level that is likely to be clinically efficacious.

[0616] The iCasp9 system presented herein also may avoid additional limitations seen with other cell based and/or suicide switch based therapies. Loss of expression due to silencing of the transduced construct is frequently observed after retroviral transduction of mammalian cells. The expression constructs presented herein showed no evidence of such an effect. No decrease in expression or induced death was evident, even after one month in culture.

[0617] Another potential problem sometimes observed in other cell based and/or suicide switch based therapies, is the development of resistance in cells that have upregulated anti-apoptotic genes. This effect has been observed in other suicide systems involving different elements of the programmed cell death pathways such as Fas. iCasp9 was chosen as the suicide gene for the expression constructs presented herein because it was less likely to have this limitation. Compared to other members of the apoptotic cascade, activation of Caspase-9 occurs late in the apoptotic pathway and therefore should bypass the effects of many if not all anti-apoptotic regulators, such as c-FLIP and bcl-2 family members.

[0618] A potential limitation specific to the system presented herein may be spontaneous dimerization of iCasp9, which in turn could cause unwanted cell death and poor persistence. This effect has been observed in certain other inducible systems that utilize Fas. The observation of low spontaneous death rate in transduced cells and long term persistence of transgenic cells in vivo indicate this possibility is not a significant consideration when using iCasp9 based expression constructs.

[0619] Integration events deriving from retroviral transduction of MSCs may potentially drive deleterious mutagenesis, especially when there are multiple insertions of the retroviral vector, causing unwanted copy number effects and/or other undesirable effects. These unwanted effects could offset the benefit of a retrovirally transduced suicide system. These effects often can be minimized using clinical grade retroviral supernatant obtained from stable producer cell lines and similar culture conditions to transduce T lymphocytes. The T cells transduced and evaluated herein contain in the range of about 1 to 3 integrants (the supernatant containing in the range of about 1× 10⁶ viral particles/mL). The substitution of lentiviral for retroviral vectors could further reduce the risk of genotoxicity, especially in cells with high self-renewal and differentiation potential.

[0620] While a small proportion of iCasp9-positive MSCs persists after a single exposure to CID, these surviving cells can subsequently be killed following re-exposure to CID. In vivo, there is >99% depletion with two doses, but it is likely that repeated doses of CID will be needed for maximal depletion in the clinical setting. Additional non-limiting methods of providing extra safety when using an inducible suicide switch system include additional rounds of cell sorting to further increase the purity of the cell populations administered and the use of more than one suicide gene system to enhance the efficiency of killing.

[0621] The CD19 molecule, which is physiologically expressed by B lymphocytes, was chosen as the selectable marker for transduced cells, because of its potential advantages over other available selection systems, such as neomycin phosphotransferase (neo) and truncated low affinity nerve growth factor receptor (ΔLNGFR). “neo” encodes a potentially immunogenic foreign protein and requires a 7-day culture in selection medium, increasing the complexity of the system and potentially damaging the selected cells. ΔLNGFR expression should allow for isolation strategies similar to other surface markers, but these are not widely available for clinical use and a lingering concern remains about the oncogenic potential of ΔLNGFR. In contrast, magnetic selection of iCasp9-positive cells by CD19 expression using a clinical grade device is readily available and has shown no notable effects on subsequent cell growth or differentiation.

[0622] The procedure used for preparation and administration of mesenchymal stromal cells comprising the Caspase-9 safety switch may also be used for the preparation of embryonic stem cells and inducible pluripotent stem cells. Thus for the procedures outlined in the present example, either embryonic stem cells or inducible pluripotent stem cells may be substituted for the mesenchymal stromal cells provided in the example. In these cells, retroviral and lentiviral vectors may be used, with, for example, CMV promoters, or the ronin promoter.

### Example 6: Modified Caspase-9 Polypeptides with Lower Basal Activity and Minimal Loss of Ligand IC₅₀

[0623] Basal signaling, signaling in the absence of agonist or activating agent, is prevalent in a multitude of biomolecules. For example, it has been observed in more than 60 wild-type G protein coupled receptors (GPCRs) from multiple subfamilies [1], kinases, such as ERK and abl [2], surface immunoglobulins [3], and proteases. Basal signaling has been hypothesized to contribute to a vast variety of biological events, from maintenance of embryonic stem cell pluripotency, B cell development and differentiation [4-6], T cell differentiation [2, 7], thymocyte development [8], endocytosis and drug tolerance [9], autoimmunity [10], to plant growth and development [11]. While its biological significance is not always fully understood or apparent, defective basal signaling can lead to serious consequences. Defective basal Gₛ protein signaling has led to diseases, such as retinitis pigmentosa, color blindness, nephrogenic diabetes insipidus, familial ACTH resistance, and familial hypocalciuric hypercalcemia [12, 13].

[0624] Even though homo-dimerization of wild-type initiator Caspase-9 is energetically unfavorable, making them mostly monomers in solution [14-16], the low-level inherent basal activity of unprocessed Caspase-9 [15, 17] is enhanced in the presence of the Apaf-1-based “apoptosome”, its natural allosteric regulator [6]. Moreover, supra-physiological expression levels and/or co-localization could lead to proximity-driven dimerization, further enhancing basal activation.

[0625] In the chimeric unmodified Caspase-9 polypeptide, innate Caspase-9 basal activity was significantly diminished by removal of the CAspase-Recruitment pro-Domain (CARD) [18], replacing it with the cognate high affinity AP1903-binding domain, FKBP12-F36V. Its usefulness as a pro-apoptotic “safety switch” for cell therapy has been well demonstrated in multiple studies [18-20]. While its high specific and low basal activity has made it a powerful tool in cell therapy, in contrast to G protein coupled receptors, there are currently no “inverse agonists” to eliminate basal signaling, which may be desirable for manufacturing, and in some applications. Preparation of Master Cell Banks has proven challenging due to high amplification of the low-level basal activity of the chimeric polypeptide. In addition, some cells are more sensitive than others to low-level basal activity of Caspase-9, leading to unintended apoptosis of transduced cells [18].

[0626] To modify the basal activity of the chimeric Caspase-9 polypeptide, “rational design”-based methods were used to engineer 75i Casp9 mutants based on residues known to play crucial roles in homo-dimerization, XIAP-mediated inhibition, or phosphorylation (Table below) rather than “directed evolution” that use multiple cycles of screening as selective pressure on randomly generated mutants. Dimerization-driven activation of Caspase-9 has been considered a dominant model of initiator Caspase activation [15, 23, 24]. To reduce spontaneous dimerization, site-directed mutagenesis was conducted of residues crucial for homo-dimerization and thus basal Caspase-9 signaling. Replacement of five key residues in the B6 strand (G402-C-F-N-F406 (SEQ ID NO: 297)), the key dimerization interface of Caspase-9, with those of constitutively dimeric effector Caspase-3 (C264-I-V-S-M268 (SEQ ID NO: 298)) converted it to a constitutively dimeric protein unresponsive to Apaf-1 activation without significant structural rearrangements [25]. To modify spontaneous homo-dimerization, systemic mutagenesis of the five residues was made, based on amino acid chemistry, and on corresponding residues of initiator Caspases-2, -8, -9, and -10 that exist predominately as a monomer in solution [14, 15]. After making and testing twenty-eight iCasp9 mutants by a secreted alkaline phosphatase (SEAP)-based surrogate killing assay (Table, below), the N405Q mutation was found to lower basal signaling with a moderate (<10-fold) cost of higher IC₅₀ to AP1903.

[0627] Since proteolysis, typically required for Caspase activation, is not absolutely required for Caspase-9 activation [26], the thermodynamic “hurdle” was increased to inhibit auto-proteolysis. In addition, since XIAP-mediated Caspase-9 binding traps Caspase-9 in a monomeric state to attenuate its catalytic and basal activity [14], there was an effort to strengthen the interaction between XIAP and Caspase-9 by mutagenizing the tetrapeptide critical for interaction with XIAP (A316-T-P-F319 (SEQ ID NO: 299), D330-A-I-S-S334 (SEQ ID NO: 301)). From 17 of these iCasp-9 mutants, it was determined that the D330A mutation lowered basal signaling with a minimum (<5-fold) AP1903 IC₅₀ cost.

[0628] The third approach was based on previously reported findings that Caspase-9 is inhibited by kinases upon phosphorylation of S144 by PKC-ζ [27], S183 by protein kinase A [28], S196 by Akt1 [29], and activated upon phosphorylation of Y153 by c-abl [30]. These “brakes” might improve the IC₅₀, or substitutions with phosphorylation mimic (“phosphomimetic”) residues could augment these “brakes” to lower basal activity. However, none of the 15 single residue mutants based on these residues successfully lowered the IC₅₀ to AP1903.

[0629] Methods such as those discussed, for example, in Examples 1-5, and throughout the present application may be applied, with appropriate modifications, if necessary to the chimeric modified Caspase-9 polypeptides, as well as to various therapeutic cells.

### Example 7: Materials and Methods

### PCR Site-Directed Mutagenesis of Caspase-9:

[0630] To modify basal signaling of Caspase-9, PCR-based site directed mutagenesis was done with mutation-containing oligos and Kapa (Kapa Biosystems, Woburn, MA). After 18 cycles of amplification, parental plasmid was removed with methylation-dependent Dpnl restriction enzyme that leaves the PCR products intact. 2 μl of resulting reaction was used to chemically transform XL1-blue or DH5α. Positive mutants were subsequently identified via sequencing (SeqWright, Houston, TX).

### Cell Line Maintenance and Transfection:

[0631] Early passage HEK293T/16 cells (ATCC, Manassas, VA) were maintained in IMDM, GlutaMAX™ (Life Technologies, Carlsbad, CA) supplemented with 10% FBS, 100 U/mL penicillin, and 100 U/mL streptomycin until transfection in a humidified, 37° C., 5% CO_{2/95}% air atmosphere. Cells in logarithmic-phase growth were transiently transfected with 800 ng to 2 μg of expression plasmid encoding iCasp9 mutants and 500 ng of an expression plasmid encoding SRα promoter driven SEAP per million cells in 15-ml conical tubes. Catalytically inactive Caspase-9 (C285A) (without the FKBP domain) or “empty” expression plasmid (“pSH1-null”) were used to keep the total plasmid levels constant between transfections. GeneJammer® Transfection Reagent at a ratio of 3 μl per μg of plasmid DNA was used to transiently transfect HEK293T/16 cells in the absence of antibiotics. 100 μl or 2 mL of the transfection mixture was added to each well in 96-well or 6-well plate, respectively. For SEAP assays, log dilutions of AP1903 were added after a minimum 3-hour incubation post-transfection. For western blots, cells were incubated for 20 minutes with AP1903 (10 nM) before harvesting.

### Secreted Alkaline Phosphatase (SEAP) Assay:

[0632] Twenty-four to forty-eight hours after AP1903 treatment, ˜100 μl of supernatants were harvested into a 96-well plate and assayed for SEAP activity as discussed [19, 32]. Briefly, after 65° C. heat denaturation for 45 minutes to reduce background caused by endogenous (and serum-derived) alkaline phosphatases that are sensitive to heat, 5 μl of supernatants was added to 95 μl of PBS and added to 100 μl of substrate buffer, containing 1 μl of 100 mM 4-methylumbelliferyl phosphate (4-MUP; Sigma, St. Louis, MO) re-suspended in 2 M diethanolamine. Hydrolysis of 4-MUP by SEAP produces a fluorescent substrate with excitation/emission (355/460 nm), which can be easily measured. Assays were performed in black opaque 96-well plates to minimize fluorescence leakage between wells. To examine both basal signaling and AP1903 induced activity, 106 early-passage HEK293T/16 cells were co-transfected with various amount of wild type Caspase and 500 ng of an expression plasmid that uses an SRα promoter to drive SEAP, a marker for cell viability. Following manufacturer's suggestions, 1 mL of IMDM+10% FBS without antibiotics was added to each mixture. 1000-μl of the mixture was seeded onto each well of a 96-well plate. 100-μl of AP1903 was added at least three hours post-transfection. After addition of AP1903 for at least 24 hours, 100-μl of supernatant was transferred to a 96-well plate and heat denatured at 68° C. for 30 minutes to inactivate endogenous alkaline phosphatases. For the assay, 4-methylumbelliferyl phosphate substrate was hydrolyzed by SEAP to 4-methylumbelliferon, a metabolite that can be excited with 364 nm and detected with an emission filter of 448 nm. Since SEAP is used as a marker for cell viability, reduced SEAP reading corresponds with increased iCaspase-9 activities. Thus, a higher SEAP reading in the absence of AP1903 would indicate lower basal activity. Desired caspase mutants would have diminished basal signaling with increased sensitivity (i.e., lower IC₅₀) to AP1903. The goal of the study is to reduce basal signaling without significantly impairing IC₅₀.

### Western Blot Analysis:

[0633] HEK293T/16 cells transiently transfected with 2 μg of plasmid for 48-72 hours were treated with AP1903 for 7.5 to 20 minutes (as indicated) at 37° C. and subsequently lysed in 500 μl of RIPA buffer (0.01 M Tris·HCl, pH 8.0/140 mM NaCl/1% Triton X-100/1 mM phenylmethylsulfonyl fluoride/1% sodium deoxycholate/0.1% SDS) with Halt™ Protease Inhibitor Cocktail. The lysates were collected and lysed on ice for 30 min. After pelleting cell debris, protein concentrations from overlying supernatants were measured in 96-well plates with BCA™ Protein Assay as recommended by the manufacturer. 30 μg of proteins were boiled in Laemmli sample buffer (Bio-Rad, Hercules, CA) with 2.5% 2-mercaptoethanol for 5 min at 95° C. before being separated by Criterion TGX 10% Tris/glylcine protein gel. Membranes were probed with 1/1000 rabbit anti-human Caspase-9 polyclonal antibody followed by 1/10,000 HRP-conjugated goat anti-rabbit IgG F(ab′)2 secondary antibody (Bio-Rad). Protein bands were detected using Supersignal West Femto chemiluminescent substrate. To ensure equivalent sample loading, blots were stripped at 65° C. for 1 hour with Restore PLUS Western Blot Stripping Buffer before labeling with 1/10,000 rabbit anti-actin polyclonal antibody. Unless otherwise stated, all the reagents were purchased from Thermo Scientific.

[0634] Methods and constructs discussed in Examples 1-5, and throughout the present specification may also be used to assay and use the modified Caspase-9 polypeptides.

### Example 8: Evaluation and Activity of Chimeric Modified Caspase-9 Polypeptides

### Comparison of Basal Activity and AP1903 Induced Activity:

[0635] To examine both basal activity and AP1903 induced activity of the chimeric modified Caspase-9 polypeptides, SEAP activities of HEK293T/16 cells co-transfected with SEAP and different amounts of iCasp9 mutants were examined. iCasp9 D330A, N405Q, and D330A-N405Q showed significantly less basal activity than unmodified iCasp9 for cells transfected with either 1 μg iCasp9 per million cells (relative SEAP activity Units of 148928, 179081, 205772 vs. 114518) or 2 μg iCasp9 per million cells (136863, 175529, 174366 vs. 98889). The basal signaling of all three chimeric modified Caspase-9 polypeptides when transfected at 2 μg per million cells was significantly higher (p value <0.05). iCasp9 D330A, N405Q, and D330A-N405Q also showed increased estimated IC₅₀s for AP1903, but they are all still less than 6 PM (based on the SEAP assay), compared to 1 pM for WT, making them potentially useful apoptosis switches.

### Evaluation of Protein Expression Levels and Proteolysis:

[0636] To exclude the possibility that the observed reduction in basal activity of the chimeric modified Caspase-9 polypeptides was attributable to decreased protein stability or variation in transfection efficiency, and to examine auto-proteolysis of iCasp9, the protein expression levels of Caspase-9 variants in transfected HEK293T/16 cells was assayed. Protein levels of chimeric unmodified Caspase-9 polypeptide, iCasp9 D330A, and iCasp9 D330A-N405Q all showed similar protein levels under the transfection conditions used in this study. In contrast, the iCasp9 N405Q band appeared darker than the others, particularly when 2 μg of expression plasmids was used. Auto-proteolysis was not easily detectable at the transfection conditions used, likely because only viable cells were collected. Anti-actin protein reblotting confirmed that comparable lysate amounts were loaded into each lane. These results support the observed lower basal signaling in the iCasp9 D330A, N405Q, and D330A-N405Q mutants, observed by SEAP assays.

### DISCUSSION

[0637] Based on the SEAP screening assay, these three chimeric modified Caspase-9 polypeptides showed higher AP1903-independent SEAP activity, compared to iCasp9 WT transfectants, and hence lower basal signaling. However, the double mutation (D330-N405Q) failed to further decrease either basal activity or IC₅₀ (0.05 nM) vs. the single amino acid mutants. The differences observed did not appear to be due to protein instability or differential amount of plasmids used during transfection.

### Example 9: Evaluation and Activity of Chimeric Modified Caspase-9 Polypeptides

[0638] Inducible Caspase-9 provides for rapid, cell-cycle-independent, cell autonomous killing in an AP1903-dependent fashion. Improving the characteristics of this inducible Caspase-9 polypeptide would allow for even broader applicability. It is desirable to decrease the protein's ligand-independent cytotoxicity, and increase its killing at low levels of expression. Although ligand-independent cytotoxicity is not a concern at relatively low levels of expression, it can have a material impact where levels of expression can reach one or more orders of magnitude higher than in primary target cells, such as during vector production. Also, cells can be differentially sensitive to low levels of caspase expression due to the level of apoptosis inhibitors, like XIAP and Bcl-2, which cells express. Therefore, to re-engineer the caspase polypeptide to have a lower basal activity and possibly higher sensitivity to AP1903 ligand, four mutagenesis strategies were devised.

[0639] Dimerization Domain: Although Caspase-9 is a monomer in solution at physiological levels, at high levels of expression, such as occurs in the pro-apoptotic, Apaf-driven “apoptosome”, Caspase-9 can dimerize, leading to auto-proteolysis at D315 and a large increase in catalytic activity. Since C285 is part of the active site, mutation C285A is catalytically inactive and is used as a negative control construct. Dimerization involves very close interaction of five residues in particular, namely G402, C403, F404, N405, and F406. For each residue, a variety of amino acid substitutions, representing different classes of amino acids (e.g., hydrophobic, polar, etc.) were constructed. Interestingly, all mutants at G402 (i.e., G402A, G4021, G402Q, G402Y) and C403P led to a catalytically inactive caspase polypeptide. Additional C403 mutations (i.e., C403A, C403S, and C403T) were similar to the wild type caspase and were not pursued further. Mutations at F404 all lowered basal activity, but also reflected reduced sensitivity to IC₅₀, from ˜ 1 log to unmeasurable. In order of efficacy, they are: F404Y>F404T, F404W>>F404A, F404S. Mutations at N405 either had no effect, as with N405A, increased basal activity, as in N405T, or lowered basal activity concomitant with either a small (˜ 5-fold) or larger deleterious effect on IC₅₀, as with N405Q and N405F, respectively. Finally, like F404, mutations at F406 all lowered basal activity, and reflected reduced sensitivity to IC₅₀, from ˜ 1 log to unmeasurable. In order of efficacy, they are: F406A F406W, F406Y>F406T>>F406L.

[0640] Some polypeptides were constructed and tested that had compound mutations within the dimerization domain, but substituting the analogous 5 residues from other caspases, known to be monomers (e.g., Caspase-2, -8, -10) or dimers (e.g., Caspase-3) in solution. Caspase-9 polypeptides, containing the 5-residue change from Caspase-2, -3, and -8, along with an AAAAA (SEQ ID NO: 302) alanine substitution were all catalytically inactive, while the equivalent residues from Caspase-10 (ISAQT (SEQ ID NO: 303)), led to reduced basal activity but higher IC₅₀.

[0641] Overall, based on the combination of consistently lower basal activity, combined with only a mild effect on IC₅₀, N405Q was selected for further experiments. To improve on efficacy, a codon-optimized version of the modified Caspase-9 polypeptide, having the N405Q substitution, called N405Qco, was tested. This polypeptide appeared marginally more sensitive to AP1903 than the wild type N405Q-substituted Caspase-9 polypeptide.

[0642] Cleavage site mutants: Following aggregation of Caspase-9 within the apoptosome or via AP1903-enforced homodimerization, auto-proteolysis at D315 occurs. This creates a new amino-terminus at A316, at least transiently. Interestingly, the newly revealed tetra-peptide, ³¹⁶ATPF³¹⁹ (SEQ ID NO: 299), binds to the Caspase-9 inhibitor, XIAP, which competes for dimerization with Caspase-9 itself at the dimerization motif, GCFNF (SEQ ID NO: 297), discussed above. Therefore, the initial outcome of D315 cleavage is XIAP binding, attenuating further Caspase-9 activation. However, a second caspase cleavage site exists at D330, which is the target of downstream effector caspase, caspase-3. As the pro-apoptotic pressure builds, D330 becomes increasingly cleaved, releasing the XIAP-binding small peptide within residue 316 to 330, and hence, removing this mitigating Caspase-9 inhibitor. A D330A mutant was constructed, which lowered basal activity, but not as low as in N405Q. By SEAP assay at high copy number, it also revealed a slight increase in IC₅₀, but at low copy number in primary T cells, there was actually a slight increase in IC₅₀ with improved killing of target cells. Mutation at auto-proteolysis site, D315, also reduced basal activity, but this led to a large increase in IC₅₀, likely as D330 cleavage was then necessary for caspase activation. A double mutation at D315A and D330A, led to an inactive “locked” Caspase-9 that could not be processed properly.

[0643] Other D330 mutants were created, including D330E, D330G, D330N, D330S, and D330V. Mutation at D327 also prevented cleavage at D330, as the consensus Caspase-3 cleavage site is DxxD, but several D327 mutations (i.e., D327G, D327K, and D327R) along with F326K, Q328K, Q328R, L329K, L329G, and A331K, unlike D330 mutations, did not lower basal activity and were not pursued further.

[0644] XIAP-binding mutants: As discussed above, autoproteolysis at D315 reveals an XIAP-binding tetrapeptide, ³¹⁶ATPF³¹⁹ (SEQ ID NO: 299), which “lures” XIAP into the Caspase-9 complex. Substitution of ATPF (SEQ ID NO: 299) with the analogous XIAP-binding tetrapeptide, AVPI (SEQ ID NO: 304), from mitochondria-derived anti-XIAP inhibitor, SMAC/DIABLO, might bind more tightly to XIAP and lower basal activity. However, this 4-residue substitution had no effect. Other substitutions within the ATPF motif (SEQ ID NO: 299) ranged from no effect, (i.e., T317C, P318A, F319A) to lower basal activity with either a very mild (i.e., T317S, mild (i.e., T317A) to large (i.e., A316G, F319W) increase in IC₅₀. Overall, the effects of changing the XIAP-binding tetrapeptide were mild; nonetheless, T317S was selected for testing in double mutations (discussed below), since the effects on IC₅₀ were the most mild of the group.

[0645] Phosphorylation mutants: A small number of Caspase-9 residues were reported to be the targets of either inhibitory (e.g., S144, S183, S195, S196, S307, T317) or activating (i.e., Y153) phosphorylations. Therefore, mutations that either mimic the phosphorylation (“phosphomimetics”) by substitution with an acidic residue (e.g., Asp) or eliminate phosphorylation were tested. In general, most mutations, regardless of whether a phosphomimetic or not was tried, lowered basal activity. Among the mutants with lower basal activity, mutations at S144 (i.e., S144A and S144D) and S1496D had no discernable effect on IC₅₀, mutants S183A, S195A, and S196A increased the IC₅₀ mildly, and mutants Y153A, Y153A, and S307A had a big deleterious effect on IC₅₀. Due to the combination of lower basal activity and minimal, if any effect on IC₅₀, S144A was chosen for double mutations (discussed below).

[0646] Double mutants: In order to combine the slightly improved efficacy of D330A variant with possible residues that could further lower basal activity, numerous D330A double mutants were constructed and tested. Typically, they maintained lower basal activity with only a slight increase in IC₅₀, including 2nd mutations at N405Q, S144A, S144D, S183A, and S196A. Double mutant D330A-N405T had higher basal activity and double mutants at D330A with Y153A, Y153F, and T317E were catalytically inactive. A series of double mutants with low basal activity N405Q, intended to improve efficacy or decrease the IC₅₀ was tested. These all appeared similar to N405Q in terms of low basal activity and slightly increased IC₅₀ relative to iC9-1.0, and included N405Q with S144A, S144D, S196D, and T317S.

[0647] SEAP assays were conducted to study the basal activity and CID sensitivity of some of the dimerization domain mutants. N405Q was the most AP1903-sensitive of the mutants tested with lower basal activity than the WT Caspase-9, as determined by a shift upwards of AP1903-independent signaling. F406T was the least CID-sensitive from this group.

[0648] The dimer-independent SEAP activity of mutant caspase polypeptides D330A and N405Q was assayed, along with double mutant D330A-N405Q. The results of multiple transfections (N=7 to 13) found that N405Q has lower basal activity than D330A and the double mutant is intermediate.

[0649] Obtaining the average (+stdev, n=5) IC₅₀ of mutant caspase polypeptides D330A and N405Q, along with double mutant D330A-N405Qshows that D330A is somewhat more sensitive to AP1903 than N405Q mutants but about 2-fold less sensitive than WT Caspase-9 in a transient transfection assay.

[0650] SEAP assays were conducted using wild type (WT) Caspase-9, N405Q, inactive C285A, and several T317 mutants within the XIAP-binding domain. The results show that T317S and T317A can reduce basal activity without a large shift in the IC₅₀ to APf1903. Therefore, T317S was chosen to make double mutants with N405Q.

[0651] IC₅₀s from the SEAP assays above showed that T317A and T317S have similar IC₅₀s to wild type Caspase-9 polypeptide despite having lower basal activity.

[0652] The dimer-independent SEAP activity from several D330 mutants showed that all members of this class tested, including D330A, D330E, D330N, D330V, D330G, and D330S, have less basal activity than wild type Caspase-9. Basal and AP1903-induced activation of D330A variants was assayed. SEAP assay of transiently transfected HEK293/16 cells with 1 or 2 μg of mutant caspase polypeptides and 0.5 ug of pSH1-kSEAP per million HEK293 cells, 72 hours post-transfection. Normalized data based on 2 μg of each expression plasmid (including WT) were mixed with normalized data from 1 ug-based transfections. iCasp9-D330A, -D330E, and -D330S showed statistically lower basal signaling than wildtype Caspase-9.

[0653] The result of a western blot shoed that the D330 mutations block cleavage at D330, leading to a slightly largely (slower migrating) small band (<20 kDa marker). Other blots show that D327 mutation also blocks cleavage.

[0654] The mean fluorescence intensities of multiple clones of PG13 transduced 5× with retroviruses encoding the indicated Caspase-9 polypeptides was measured. Lower basal activity typically translates to higher levels of expression of the Caspase-9 gene along with the genetically linked reporter, CD19. The results show that on the average, clones expressing the N405Q mutant express higher levels of CD19, reflecting the lower basal activity of N405Q over D330 mutants or WT Caspase-9. The effects of various caspase mutations on viral titers derived from PG13 packaging cells cross-transduced with VSV-G envelope-based retroviral supernatants was assayed. To examine the effect of iC9-derived basal signaling on retrovirus master cell line production, retrovirus packaging cell line, PG13, was cross-transduced five times with VSV-G-based retroviral supernatants in the presence of 4 μg/ml transfection-enhancer, polybrene. iC9-transduced PG13 cells were subsequently stained with PE-conjugated anti-human CD19 antibody, as an indication of transduction. iC9-D330A, -D330E, and -N405Q-transduced PG13 cells showed enhanced CD19 mean fluorescence intensity (MFI), indicating higher retroviral copy numbers, implying lower basal activity. To more directly examine the viral titer of the PG13 transductants, HT1080 cells were treated with viral supernatant and 8 μg/ml polybrene. The enhanced CD19 MFIs of iCasp9-D330A, -N405Q, and -D330E transductants vs WT iCasp9 in PG13 cells are positively correlated with higher viral titers, as observed in HT1080 cells. Due to the initially low viral titers (approximately 1E5 transduction units (TU)/ml), no differences in viral titers were observed in the absence of HAT treatment to increase virus yields. Upon HAT media treatment, PG13 cells transduced with iC9-D330A, -N405Q, or -D330E demonstrated higher viral titers. Viral titer (transducing units) is calculated with the formula: Viral titer=(#cells on the day of transduction)*(% CD19⁺)/Volume of supernatant (ml). In order to further investigate the effect of iC9 mutants with lower basal activity, individual clones (colonies) of iC9-transduced PG13 cells were selected and expanded. iC9-N405Q clones with higher CD19 MFIs than the other cohorts were observed.

[0655] The effects of various caspase polypeptides at mostly single copy in primary T cells was assayed. This may reflect more accurately how these suicide genes will be used therapeutically. Surprisingly, the data show that the D330A mutant is actually more sensitive to AP1903 at low titers and kills at least as well as WT Caspase-9 when tested in a 24-hour assay. The N405Q mutant is less sensitive to AP1903 and cannot kill target cells as efficiently within 24 hours.

[0656] Results of transducing 6 independent T cell samples from separate healthy donors showed that the D330A mutant (mut) is more sensitive to AP1903 than the wild type Caspase-9 polypeptide.

[0657] FIG. 57 shows the average IC₅₀, range and standard deviation from the 6 healthy donors shown in FIG. 56. This data shows that the improvement is statistically significant. The iCasp9-D330A mutant demonstrated improved AP1903-dependent cytotoxicity in transduced T cells. Primary T cells from healthy donors (n=6) were transduced with retrovirus encoding mutant or wild-type iCasp9 or iCasp9-D330A, and the ΔCD19 cell surface marker. Following transduction, iCasp9-transduced T cells were purified using CD19-microbeads and a magnetic column. T cells were then exposed to AP1903 (0-100 nM) and measured for CD3⁺CD19⁺ T cells by flow cytometry after 24 hours. The IC₅₀ of iCasp9-D330A was significantly lower (p=0.002) than wild-type iCasp9.

[0658] Results of several D330 mutants, revealed that all six D330 mutants tested (D330A, E, N, V, G, and S) are more sensitive to AP1903 than wild type Caspase-9 polypeptide.

[0659] The N405Q mutant along with other dimerization domain mutants, including N404Y and N406Y, can kill target T cells indistinguishable from wild type Caspase-9 polypeptide or D330A within 10 days. Cells that received AP1903 at Day 0 received a second dose of AP1903 at day 4. This data supports the use of reduced sensitivity Caspase-9 mutants, like N405Q as part of a regulated efficacy switch.

[0660] The results of codon optimization of N405Q caspase polypeptide, called “N405Qco”, revealed that codon optimization, likely leading to an increase in expression only has a very subtle effect on inducible caspase function. This likely reflects the use of common codons in the original Caspase-9 gene.

[0661] The Caspase-9 polypeptide has a dose-response curve in vivo, which could be used to eliminate a variable fraction of T cells expressing the Caspase-9 polypeptide. The data also shows that a dose of 0.5 mg/kg AP1903 is sufficient to eliminate most modified T cells in vivo.

[0662] AP1903 dose-dependent elimination in vivo of T cells transduced with D330E iCasp9 was assayed. T cells were transduced with SFG-iCasp9-D330E-2A-ΔCD19 retrovirus and injected i.v. into immune deficient mice (NSG). After 24 hours, mice were injected i.p. with AP1903 (0-5 mg/kg). After an additional 24 hours, mice were sacrificed and lymphocytes from the spleen (A) were isolated and analyzed by flow cytometry for the frequency of human CD3⁺CD19⁺ T cells. This shows that iCasp9-D330E demonstrates a similar in vivo cytotoxicity profile in response to AP1903 as wild-type iCasp9.

[0663] Conclusions: As discussed, from this analysis of 78 mutants so far, out of the single mutant mutations, the D330 mutations combine somewhat improved efficacy with slightly reduced basal activity. N405Q mutants are also attractive since they have very low basal activity with only slightly decreased efficacy, reflected by a 4-5-fold increase in IC₅₀. Experiments in primary T cells have shown that N405Q mutants can effectively kill target cells, but with somewhat slower kinetics than D330 mutants, making this potentially very useful for a graduated suicide switch that kills partially after an initial dose of AP1903, and up to full killing can be achieved upon a second dose of AP1903.

[0664] The following table provides a summary of basal activity and IC₅₀ for various chimeric modified Caspase-9 polypeptides prepared and assayed according to the methods discussed herein. The results are based on a minimum of two independent SEAP assays, except for a subset (i.e., A316G, T317E, F326K, D327G, D327K, D327R, Q328K, Q328R, L329G, L329K, A331K, S196A, S196D, and the following double mutants: D330A with S144A, S144D, or S183A; and N405Q with S144A, S144D, S196D, or T317S) that were tested once. Four multi-pronged approaches were taken to generate the tested chimeric modified Caspase-9 polypeptides. “Dead” modified Caspase-9 polypeptides were no longer responsive to AP1903. Double mutants are indicated by a hyphen, for example, D330A-N405Q denotes a modified Caspase-9 polypeptide having a substitution at position 330 and a substitution at position 405.

TABLE 5
Caspase Mutant Classes

| | | Cleavage sites | | | |
|---|---|---|---|---|---|
| | Homodimerization | & XIAP | | Double | |
| Basal Activity | domain | Interaction | Phosphorylation | mutants, Misc. | Total mutants |
| Decreased | | | S144A | | 80 |
| basal and | | | S144D | | *, predicated |
| similar IC₅₀ | | T3175 | S196D | | |
| Decreased | N405Q | D330A | S183A | D330A-N405Q | Bold, Tested in |
| basal but | | | | | T cells |
| higher IC₅₀ | ⁴⁰²GCFNF⁴⁰⁶ISAQT | D330E | S195A | D330A-S144A | |
| | (Casp-10) | D330G | S196A | D330A-S144D | |
| | (SEQ ID NOS 297 | | | | |
| | and 303) | | | | |
| | F404Y | | | | |
| | F406A | D330N | | D330A-S183A | |
| | F406W | D330S | | D330A-S196A | |
| | F406Y | D330V | | N405Q-S144A | |
| | N405Qco | L329E | | N405Q-S144D | |
| | | T317A | | N405Q-S196D | |
| | | | | N405Q-T317S | |
| | | | | *N405Q-S144Aco | |
| Decreased | F404T | D315A | Y153A | *N405Q-T317Sco | |
| basal but | F404W | A316G | Y153F | | |
| much higher | N405F | F319W | S307A | | |
| IC₅₀ | F406T | | | | |
| Similar basal | C403A | ³¹⁶ATPF³¹⁹AVPI | | | |
| and IC₅₀ | | (SMAC/Diablo) | | | |
| | | (SEQ ID NOS | | | |
| | | 299 and 304) | | | |
| | C403S | T317C | | | |
| | C403T | P318A | | | |
| | N405A | F319A | | | |
| Increased | N405T | T317E | | | D330A-N405T |
| basal | | F326K | | | |
| | | D327G | | | |
| | | D327K | | | |
| | | D327R | | | |
| | | Q328K | | | |
| | | Q328R | | | |
| | | L329G | | | |
| | | L329K | | | |
| | | A331K | | | |
| Catalytically | ⁴⁰²GCFNF⁴⁰⁶AAAAA | | | | C285A |
| dead | (SEQ ID NOS 297 | | | | |
| | and 302) | | | | |
| | ⁴⁰²GCFNF⁴⁰⁶YCSTL | | | | D315A-D330A |
| | (Casp-2) | | | | |
| | (SEQ ID NOS 297 | | | | |
| | and 305) | | | | |
| | ⁴⁰²GCFNF⁴⁰⁶CIVSM | | | | D330A-Y153A |
| | (Casp-3) | | | | |
| | (SEQ ID NOS 297 | | | | |
| | and 306) | | | | |
| | ⁴⁰²GCFNF⁴⁰⁶QPTFT | | | | D330A-Y153F |
| | (Casp-8) | | | | |
| | (SEQ ID NOS 297 | | | | |
| | and 307) | | | | |
| | G402A | | | | D330A-T317E |
| | G402I | | | | |
| | G402Q | | | | |
| | G402Y | | | | |
| | C403P | | | | |
| | F404A | | | | |
| | F404S | | | | |
| | F406L | | | | |

### LITERATURE REFERENCES CITED IN EXAMPLES 6-9

[0665] 1. Seifert, R. and K. Wenzel-Seifert, Constitutive activity of G-protein-coupled receptors: cause of disease and common property of wild-type receptors. Naunyn Schmiedebergs Arch Pharmacol, 2002. 366 (5): p. 381-416.
[0666] 2. Roose, J. P., et al., T cell receptor-independent basal signaling via Erk and Abl kinases suppresses RAG gene expression. PLOS Biol, 2003. 1 (2): p. E53.
[0667] 3. Tze, L. E., et al., Basal immunoglobulin signaling actively maintains developmental stage in immature B cells. PLoS Biol, 2005. 3 (3): p. e82.
[0668] 4. Schram, B. R., et al., B cell receptor basal signaling regulates antigen-induced Ig light chain rearrangements. J Immunol, 2008. 180 (7): p. 4728-41.
[0669] 5. Randall, K. L., et al., Dock8 mutations cripple B cell immunological synapses, germinal centers and long-lived antibody production. Nat Immunol, 2009. 10 (12): p. 1283-91.
[0670] 6. Kouskoff, V., et al., B cell receptor expression level determines the fate of developing B lymphocytes: receptor editing versus selection. Proc Natl Acad Sci USA, 2000. 97 (13): p. 7435-9.
[0671] 7. Hong, T., et al., A simple theoretical framework for understanding heterogeneous differentiation of CD4+ T cells. BMC Syst Biol, 2012. 6: p. 66.
[0672] 8. Rudd, M. L., A. Tua-Smith, and D. B. Straus, Lck SH3 domain function is required for T-cell receptor signals regulating thymocyte development. Mol Cell Biol, 2006. 26 (21): p. 7892-900.
[0673] 9. Sorkin, A. and M. von Zastrow, Endocytosis and signalling: intertwining molecular networks. Nat Rev Mol Cell Biol, 2009. 10 (9): p. 609-22.
[0674] 10. Luning Prak, E. T., M. Monestier, and R. A. Eisenberg, B cell receptor editing in tolerance and autoimmunity. Ann N Y Acad Sci, 2011. 1217: p. 96-121.
[0675] 11. Boss, W. F., et al., Basal signaling regulates plant growth and development. Plant Physiol, 2010. 154 (2): p. 439-43.
[0676] 12. Tao, Y. X., Constitutive activation of G protein-coupled receptors and diseases: insights into mechanisms of activation and therapeutics. Pharmacol Ther, 2008. 120 (2): p. 129-48.
[0677] 13. Spiegel, A. M., Defects in G protein-coupled signal transduction in human disease. Annu Rev Physiol, 1996. 58: p. 143-70.
[0678] 14. Shiozaki, E. N., et al., Mechanism of XIAP-mediated inhibition of Caspase-9. Mol Cell, 2003. 11 (2): p. 519-27.
[0679] 15. Renatus, M., et al., Dimer formation drives the activation of the cell death protease Caspase-9. Proc Natl Acad Sci USA, 2001. 98 (25): p. 14250-5.
[0680] 16. Shi, Y., Mechanisms of Caspase activation and inhibition during apoptosis. Mol Cell, 2002. 9 (3): p. 459-70.
[0681] 17. Shiozaki, E. N., J. Chai, and Y. Shi, Oligomerization and activation of Caspase-9, induced by Apaf-1 CARD. Proc Natl Acad Sci USA, 2002. 99 (7): p. 4197-202.
[0682] 18 Straathof, K. C., et al., An inducible Caspase-9 safety switch for T-cell therapy. Blood, 2005. 105 (11): p. 4247-54.
[0683] 19. MacCorkle, R. A., K. W. Freeman, and D. M. Spencer, Synthetic activation of Caspases: artificial death switches. Proc Natl Acad Sci USA, 1998. 95 (7): p. 3655-60.
[0684] 20. Di Stasi, A., et al., Inducible apoptosis as a safety switch for adoptive cell therapy. N Engl J Med, 2011. 365 (18): p. 1673-83.
[0685] 21. Chang, W. C., et al., Modifying ligand-induced and constitutive signaling of the human 5-HT4 receptor. PLOS One, 2007. 2 (12): p. e1317.
[0686] 22. Bloom, J. D. and F. H. Arnold, In the light of directed evolution: pathways of adaptive protein evolution. Proc Natl Acad Sci USA, 2009. 106 Suppl 1: p. 9995-10000.
[0687] 23. Boatright, K. M. and G. S. Salvesen, Mechanisms of Caspase activation. Curr Opin Cell Biol, 2003. 15 (6): p. 725-31.
[0688] 24. Boatright, K. M., et al., A unified model for apical Caspase activation. Mol Cell, 2003. 11 (2): p. 529-41.
[0689] 25. Chao, Y., et al., Engineering a dimeric Caspase-9: a re-evaluation of the induced proximity model for Caspase activation. PLOS Biol, 2005. 3 (6): p. e183.
[0690] 26. Stennicke, H. R., et al., Caspase-9 can be activated without proteolytic processing. J Biol Chem, 1999. 274 (13): p. 8359-62.
[0691] 27. Brady, S. C., L. A. Allan, and P. R. Clarke, Regulation of Caspase-9 through phosphorylation by protein kinase C zeta in response to hyperosmotic stress. Mol Cell Biol, 2005. 25 (23): p. 10543-55.
[0692] 28. Martin, M. C., et al., Protein kinase A regulates Caspase-9 activation by Apaf-1 downstream of cytochrome c. J Biol Chem, 2005. 280 (15): p. 15449-55.
[0693] 29. Cardone, M. H., et al., Regulation of cell death protease Caspase-9 by phosphorylation. Science, 1998. 282 (5392): p. 1318-21.
[0694] 30. Raina, D., et al., c-Abl tyrosine kinase regulates Caspase-9 autocleavage in the apoptotic response to DNA damage. J Biol Chem, 2005. 280 (12): p. 11147-51.
[0695] 31. Papworth, C., Bauer, J. C., Braman, J. and Wright, D. A., Site-directed mutagenesis in one day with >80% efficiency. Strategies, 1996. 9 (3): p. 3-4.
[0696] 32. Spencer, D. M., et al., Functional analysis of Fas signaling in vivo using synthetic inducers of dimerization. Curr Biol, 1996. 6 (7): p. 839-47.
[0697] 33. Hsiao, E. C., et al., Constitutive Gs activation using a single-construct tetracycline-inducible expression system in embryonic stem cells and mice. Stem Cell Res Ther, 2011. 2 (2): p. 11.
[0698] 34. Waldner, C., et al., Double conditional human embryonic kidney cell line based on FLP and PhiC31 mediated transgene integration. BMC Res Notes, 2011. 4: p. 420.

[0699] The chimeric caspase polypeptides may include amino acid substitutions, including amino acid substitutions that result in a caspase polypeptide with lower basal activity. These may include, for example, iCasp9 D330A, iCasp9 N405Q, and iCasp9 D330A N405Q, demonstrated low to undetectable basal activity, respectively, with a minimum deleterious effect on their AP1903 IC₅₀ in a SEAP reporter-based, surrogate killing assay.

### Example 10: Examples of Particular Nucleic Acid and Amino Acid Sequences

[0700] The following is nucleotide sequences provide an example of a construct that may be used for expression of the chimeric protein and CD19 marker. The figure presents the SFG.iC9.2A.²CD19.gcs construct

SEQ ID NO: 1, nucleotide sequence of 5′LTR sequence
TGAAAGACCCCACCTGTAGGTTTGGCAAGCTAGCTTAAGTAACGCCATTTTGCAAGGCATGGA
AAAATACATAACTGAGAATAGAAAAGTTCAGATCAAGGTCAGGAACAGATGGAACAGCTGAAT
ATGGGCCAAACAGGATATCTGTGGTAAGCAGTTCCTGCCCCGGCTCAGGGCCAAGAACAGAT
GGAACAGCTGAATATGGGCCAAACAGGATATCTGTGGTAAGCAGTTCCTGCCCCGGCTCAGG
GCCAAGAACAGATGGTCCCCAGATGCGGTCCAGCCCTCAGCAGTTTCTAGAGAACCATCAGA
TGTTTCCAGGGTGCCCCAAGGACCTGAAATGACCCTGTGCCTTATTTGAACTAACCAATCAGT
TCGCTTCTCGCTTCTGTTCGCGCGCTTATGCTCCCCGAGCTCAATAAAAGAGCCCACAACCC
CTCACTCGGGGCGCCAGTCCTCCGATTGACTGAGTCGCCCGGGTACCCGTGTATCCAATAAA
CCCTCTTGCAGTTGCATCCGACTTGTGGTCTCGCTGTTCCTTGGGAGGGTCTCCTCTGAGTG
ATTGACTACCCGTCAGCGGGGGTCTTTCA
SEQ ID NO: 2, nucleotide sequence of Fᵥ (human FKBP12v36)
GGAGTGCAGGTGGAAACCATCTCCCCAGGAGACGGGCGCACCTTCCCCAAGCGCGGCCAGA
CCTGCGTGGTGCACTACACCGGGATGCTTGAAGATGGAAAGAAAGTTGATTCCTCCCGGGAC
AGAAACAAGCCCTTTAAGTTTATGCTAGGCAAGCAGGAGGTGATCCGAGGCTGGGAAGAAGG
GGTTGCCCAGATGAGTGTGGGTCAGAGAGCCAAACTGACTATATCTCCAGATTATGCCTATG
GTGCCACTGGGCACCCAGGCATCATCCCACCACATGCCACTCTCGTCTTCGATGTGGAGCTT
CTAAAACTGGAA
SEQ ID NO: 3 amino acid sequence of Fv (human FKBP12v36)
G V Q V E T I S P G D G R T F P K R G Q T C V V H Y T G M L E D G K K
V D S S R D R N K P F K F M L G K Q E V I R G W E E G V A Q M S V G Q
R A K L T I S P D Y A Y G A T G H P G I I P P H A T L V F D V E L L K L E
SEQ ID NO: 4, GS linker (SEQ ID NO: 151) nucleotide sequence
TCTGGCGGTGGATCCGGA
SEQ ID NO: 5, GS linker (SEQ ID NO: 151) amino acid sequence
S G G G S G
SEQ ID NO: 6, linker nucleotide sequence (between GS linker (SEQ ID NO: 151) and Casp 9)
GTCGAC
SEQ ID NO: 7, linker amino acid sequence (between GS linker (SEQ ID NO: 151) and Casp 9)
VD
SEQ ID NO: 8, Casp 9 (truncated) nucleotide sequence
GGATTTGGTGATGTCGGTGCTCTTGAGAGTTTGAGGGGAAATGCAGATTTGGCTTACATCCTG
AGCATGGAGCCCTGTGGCCACTGCCTCATTATCAACAATGTGAACTTCTGCCGTGAGTCCGG
GCTCCGCACCCGCACTGGCTCCAACATCGACTGTGAGAAGTTGCGGCGTCGCTTCTCCTCGC
TGCATTTCATGGTGGAGGTGAAGGGCGACCTGACTGCCAAGAAAATGGTGCTGGCTTTGCTG
GAGCTGGCGCAGCAGGACCACGGTGCTCTGGACTGCTGCGTGGTGGTCATTCTCTCTCACG
GCTGTCAGGCCAGCCACCTGCAGTTCCCAGGGGCTGTCTACGGCACAGATGGATGCCCTGT
GTCGGTCGAGAAGATTGTGAACATCTTCAATGGGACCAGCTGCCCCAGCCTGGGAGGGAAG
CCCAAGCTCTTTTTCATCCAGGCCTGTGGTGGGGAGCAGAAAGACCATGGGTTTGAGGTGGC
CTCCACTTCCCCTGAAGACGAGTCCCCTGGCAGTAACCCCGAGCCAGATGCCACCCCGTTCC
AGGAAGGTTTGAGGACCTTCGACCAGCTGGACGCCATATCTAGTTTGCCCACACCCAGTGAC
ATCTTTGTGTCCTACTCTACTTTCCCAGGTTTTGTTTCCTGGAGGGACCCCAAGAGTGGCTCC
TGGTACGTTGAGACCCTGGACGACATCTTTGAGCAGTGGGCTCACTCTGAAGACCTGCAGTC
CCTCCTGCTTAGGGTCGCTAATGCTGTTTCGGTGAAAGGGATTTATAAACAGATGCCTGGTTG
CTTTAATTTCCTCCGGAAAAAACTTTTCTTTAAAACATCA
SEQ ID NO: 9, Caspase-9 (truncated) amino acid sequence-CARD domain deleted
G F G D V G A L E S L R G N A D L A Y I L S M E P C G H C L I I N N V N
F C R E S G L R T R T G S N I D C E K L R R R F S S L H F M V E V K G D
L T A K K M V L A L L E L A Q Q D H G A L D C C V V V I L S H G C Q A S
H L Q F P G A V Y G T D G C P V S V E K I V N I F N G T S C P S L G G K
P K L F F I Q A C G G E Q K D H G F E V A S T S P E D E S P G S N P E P
D A T P F Q E G L R T F D Q L D A I S S L P T P S D I F V S Y S T F P G
F V S W R D P K S G S W Y V E T L D D I F E Q W A H S E D L Q S L L L
R V A N A V S V K G I Y K Q M P G C F N F L R K K L F F K T S
SEQ ID NO: 10, linker nucleotide sequence (between Caspase-9 and 2A)
GCTAGCAGA
SEQ ID NO: 11, linker amino acid sequence (between Caspase-9 and 2A)
ASR
SEQ ID NO: 12, Thosea asigna virus-2A from capsid protein precursor nucleotide sequence
GCCGAGGGCAGGGGAAGTCTTCTAACATGCGGGGACGTGGAGGAAAATCCCGGGCCC
SEQ ID NO: 13, Thosea asigna virus-2A from capsid protein precursor amino acid sequence
A E G R G S L L T C G D V E E N P G P
SEQ ID NO: 14, human CD19 (Δ cytoplasmic domain) nucleotide sequence (transmembrane
domain in bold)
ATGCCACCTCCTCGCCTCCTCTTCTTCCTCCTCTTCCTCACCCCCATGGAAGTCAGGCCCGA
GGAACCTCTAGTGGTGAAGGTGGAAGAGGGAGATAACGCTGTGCTGCAGTGCCTCAAGGGG
ACCTCAGATGGCCCCACTCAGCAGCTGACCTGGTCTCGGGAGTCCCCGCTTAAACCCTTCTT
AAAACTCAGCCTGGGGCTGCCAGGCCTGGGAATCCACATGAGGCCCCTGGCCATCTGGCTT
TTCATCTTCAACGTCTCTCAACAGATGGGGGGCTTCTACCTGTGCCAGCCGGGGCCCCCCTC
TGAGAAGGCCTGGCAGCCTGGCTGGACAGTCAATGTGGAGGGCAGCGGGGAGCTGTTCCG
GTGGAATGTTTCGGACCTAGGTGGCCTGGGCTGTGGCCTGAAGAACAGGTCCTCAGAGGGC
CCCAGCTCCCCTTCCGGGAAGCTCATGAGCCCCAAGCTGTATGTGTGGGCCAAAGACCGCC
CTGAGATCTGGGAGGGAGAGCCTCCGTGTCTCCCACCGAGGGACAGCCTGAACCAGAGCCT
CAGCCAGGACCTCACCATGGCCCCTGGCTCCACACTCTGGCTGTCCTGTGGGGTACCCCCT
GACTCTGTGTCCAGGGGCCCCCTCTCCTGGACCCATGTGCACCCCAAGGGGCCTAAGTCATT
GCTGAGCCTAGAGCTGAAGGACGATCGCCCGGCCAGAGATATGTGGGTAATGGAGACGGGT
CTGTTGTTGCCCCGGGCCACAGCTCAAGACGCTGGAAAGTATTATTGTCACCGTGGCAACCT
GACCATGTCATTCCACCTGGAGATCACTGCTCGGCCAGTACTATGGCACTGGCTGCTGAGGA
CTGGTGGCTGGAAGGTCTCAGCTGTGACTTTGGCTTATCTGATCTTCTGCCTGTGTTCCCTTG
TGGGCATTCTTCATCTTCAAAGAGCCCTGGTCCTGAGGAGGAAAAGAAAGCGAATGACTGAC
CCCACCAGGAGATTC
SEQ ID NO: 15, human CD19 (Δ cytoplasmic domain) amino acid sequence
M P P P R L L F F L L F L T P M E V R P E E P L V V K V E E G D N A V L
Q C L K G T S D G P T Q Q L T W S R E S P L K P F L K L S L G L P G L G
I H M R P L A I W L F I F N V S Q Q M G G F Y L C Q P G P P S E K A W Q
P G W T V N V E G S G E L F R W N V S D L G G L G C G L K N R S S E G
P S S P S G K L M S P K L Y V W A K D R P E I W E G E P P C L P P R D
S L N Q S L S Q D L T M A P G S T L W L S C G V P P D S V S R G P L S
W T H V H P K G P K S L L S L E L K D D R P A R D M W V M E T G L L L
P R A T A Q D A G K Y Y C H R G N L T M S F H L E I T A R P V L W H W
L L R T G G W K V S A V T L A Y L I F C L C S L V G I L H L Q R A L V L R
R K R K R M T D P T R R F
SEQ ID NO: 16, 3′LTR nucleotide sequence
TGAAAGACCCCACCTGTAGGTTTGGCAAGCTAGCTTAAGTAACGCCATTTTGCAAGGCATGGA
AAAATACATAACTGAGAATAGAGAAGTTCAGATCAAGGTCAGGAACAGATGGAACAGCTGAAT
ATGGGCCAAACAGGATATCTGTGGTAAGCAGTTCCTGCCCCGGCTCAGGGCCAAGAACAGAT
GGAACAGCTGAATATGGGCCAAACAGGATATCTGTGGTAAGCAGTTCCTGCCCCGGCTCAGG
GCCAAGAACAGATGGTCCCCAGATGCGGTCCAGCCCTCAGCAGTTTCTAGAGAACCATCAGA
TGTTTCCAGGGTGCCCCAAGGACCTGAAATGACCCTGTGCCTTATTTGAACTAACCAATCAGT
TCGCTTCTGCTTCTGTTCGCCGCGCTTCTGCTCCCCGACGCTCAATAAAAGAGCCCACAACCC
CTCACTCGGGGCGCCAGTCCTCCGATTGACTGAGTCGCCCGGGTACCCGTGTATCCAATAAA
CCCTCTTGCAGTTGCATCCGACTTGTGGTCTCGCTGTTCCTTGGGAGGGTCTCCTCTGAGTG
ATTGACTACCCGTCAGCGGGGGTCTTTCA
SEQ ID NO: 17, Expression vector construct nucleotide sequence-nucleotide sequence coding
for the chimeric protein and 5′ and 3′ LTR sequences, and additional vector sequence.
TGAAAGACCCCACCTGTAGGTTTGGCAAGCTAGCTTAAGTAACGCCATTTTGCAAGGCATGGA
AAAATACATAACTGAGAATAGAAAAGTTCAGATCAAGGTCAGGAACAGATGGAACAGCTGAAT
ATGGGCCAAACAGGATATCTGTGGTAAGCAGTTCCTGCCCCGGCTCAGGGCCAAGAACAGAT
GGAACAGCTGAATATGGGCCAAACAGGATATCTGTGGTAAGCAGTTCCTGCCCCGGCTCAGG
GCCAAGAACAGATGGTCCCCAGATGCGGTCCAGCCCTCAGCAGTTTCTAGAGAACCATCAGA
TGTTTCCAGGGTGCCCCAAGGACCTGAAATGACCCTGTGCCTTATTTGAACTAACCAATCAGT
TCGCTTCTCGCTTCTGTTCGCGCGCTTATGCTCCCCGAGCTCAATAAAAGAGCCCACAACCC
CTCACTCGGGGCGCCAGTCCTCCGATTGACTGAGTCGCCCGGGTACCCGTGTATCCAATAAA
CCCTCTTGCAGTTGCATCCGACTTGTGGTCTCGCTGTTCCTTGGGAGGGTCTCCTCTGAGTG
ATTGACTACCCGTCAGCGGGGGTCTTTCATTTGGGGGCTCGTCCGGGATCGGGAGACCCCT
GCCCAGGGACCACCGACCCACCACCGGGAGGTAAGCTGGCCAGCAACTTATCTGTGTCTGT
CCGATTGTCTAGTGTCTATGACTGATTTTATGCGCCTGCGTCGGTACTAGTTAGCTAACTAGC
TCTGTATCTGGCGGACCCGTGGTGGAACTGACGAGTTCGGAACACCCGGCCGCAACCCTGG
GAGACGTCCCAGGGACTTCGGGGGCCGTTTTTGTGGCCCGACCTGAGTCCTAAAATCCCGAT
CGTTTAGGACTCTTTGGTGCACCCCCCTTAGAGGAGGGATATGTGGTTCTGGTAGGAGACGA
GAACCTAAAACAGTTCCCGCCTCCGTCTGAATTTTTGCTTTCGGTTTGGGACCGAAGCCGCG
CCGCGCGTCTTGTCTGCTGCAGCATCGTTCTGTGTTGTCTCTGTCTGACTGTGTTTCTGTATTT
GTCTGAAAATATGGGCCCGGGCTAGCCTGTTACCACTCCCTTAAGTTTGACCTTAGGTCACTG
GAAAGATGTCGAGCGGATCGCTCACAACCAGTCGGTAGATGTCAAGAAGAGACGTTGGGTTA
CCTTCTGCTCTGCAGAATGGCCAACCTTTAACGTCGGATGGCCGCGAGACGGCACCTTTAAC
CGAGACCTCATCACCCAGGTTAAGATCAAGGTCTTTTCACCTGGCCCGCATGGACACCCAGA
CCAGGTGGGGTACATCGTGACCTGGGAAGCCTTGGCTTTTGACCCCCCTCCCTGGGTCAAG
CCCTTTGTACACCCTAAGCCTCCGCCTCCTCTTCCTCCATCCGCCCCGTCTCTCCCCCTTGAA
CCTCCTCGTTCGACCCCGCCTCGATCCTCCCTTTATCCAGCCCTCACTCCTTCTCTAGGCGCC
CCCATATGGCCATATGAGATCTTATATGGGGCACCCCCGCCCCTTGTAAACTTCCCTGACCCT
GACATGACAAGAGTTACTAACAGCCCCTCTCTCCAAGCTCACTTACAGGCTCTCTACTTAGTC
CAGCACGAAGTCTGGAGACCTCTGGCGGCAGCCTACCAAGAACAACTGGACCGACCGGTGG
TACCTCACCCTTACCGAGTCGGCGACACAGTGTGGGTCCGCCGACACCAGACTAAGAACCTA
GAACCTCGCTGGAAAGGACCTTACACAGTCCTGCTGACCACCCCCACCGCCCTCAAAGTAGA
CGGCATCGCAGCTTGGATACACGCCGCCCACGTGAAGGCTGCCGACCCCGGGGGTGGACC
ATCCTCTAGACTGCCATGCTCGAGGGAGTGCAGGTGGAAACCATCTCCCCAGGAGACGGGC
GCACCTTCCCCAAGCGCGGCCAGACCTGCGTGGTGCACTACACCGGGATGCTTGAAGATGG
AAAGAAAGTTGATTCCTCCCGGGACAGAAACAAGCCCTTTAAGTTTATGCTAGGCAAGCAGGA
GGTGATCCGAGGCTGGGAAGAAGGGGTTGCCCAGATGAGTGTGGGTCAGAGAGCCAAACTG
ACTATATCTCCAGATTATGCCTATGGTGCCACTGGGCACCCAGGCATCATCCCACCACATGCC
ACTCTCGTCTTCGATGTGGAGCTTCTAAAACTGGAATCTGGCGGTGGATCCGGAGTCGACGG
ATTTGGTGATGTCGGTGCTCTTGAGAGTTTGAGGGGAAATGCAGATTTGGCTTACATCCTGAG
CATGGAGCCCTGTGGCCACTGCCTCATTATCAACAATGTGAACTTCTGCCGTGAGTCCGGGC
TCCGCACCCGCACTGGCTCCAACATCGACTGTGAGAAGTTGCGGCGTCGCTTCTCCTCGCTG
CATTTCATGGTGGAGGTGAAGGGCGACCTGACTGCCAAGAAAATGGTGCTGGCTTTGCTGGA
GCTGGCGCAGCAGGACCACGGTGCTCTGGACTGCTGCGTGGTGGTCATTCTCTCTCACGGC
TGTCAGGCCAGCCACCTGCAGTTCCCAGGGGCTGTCTACGGCACAGATGGATGCCCTGTGT
CGGTCGAGAAGATTGTGAACATCTTCAATGGGACCAGCTGCCCCAGCCTGGGAGGGAAGCC
CAAGCTCTTTTTCATCCAGGCCTGTGGTGGGGAGCAGAAAGACCATGGGTTTGAGGTGGCCT
CCACTTCCCCTGAAGACGAGTCCCCTGGCAGTAACCCCGAGCCAGATGCCACCCCGTTCCA
GGAAGGTTTGAGGACCTTCGACCAGCTGGACGCCATATCTAGTTTGCCCACACCCAGTGACA
TCTTTGTGTCCTACTCTACTTTCCCAGGTTTTGTTTCCTGGAGGGACCCCAAGAGTGGCTCCT
GGTACGTTGAGACCCTGGACGACATCTTTGAGCAGTGGGCTCACTCTGAAGACCTGCAGTCC
CTCCTGCTTAGGGTCGCTAATGCTGTTTCGGTGAAAGGGATTTATAAACAGATGCCTGGTTGC
TTTAATTTCCTCCGGAAAAAACTTTTCTTTAAAACATCAGCTAGCAGAGCCGAGGGCAGGGGA
AGTCTTCTAACATGCGGGGACGTGGAGGAAAATCCCGGGCCCATGCCACCTCCTCGCCTCCT
CTTCTTCCTCCTCTTCCTCACCCCCATGGAAGTCAGGCCCGAGGAACCTCTAGTGGTGAAGG
TGGAAGAGGGAGATAACGCTGTGCTGCAGTGCCTCAAGGGGACCTCAGATGGCCCCACTCA
GCAGCTGACCTGGTCTCGGGAGTCCCCGCTTAAACCCTTCTTAAAACTCAGCCTGGGGCTGC
CAGGCCTGGGAATCCACATGAGGCCCCTGGCCATCTGGCTTTTCATCTTCAACGTCTCTCAA
CAGATGGGGGGCTTCTACCTGTGCCAGCCGGGGCCCCCCTCTGAGAAGGCCTGGCAGCCTG
GCTGGACAGTCAATGTGGAGGGCAGCGGGGAGCTGTTCCGGTGGAATGTTTCGGACCTAGG
TGGCCTGGGCTGTGGCCTGAAGAACAGGTCCTCAGAGGGCCCCAGCTCCCCTTCCGGGAAG
CTCATGAGCCCCAAGCTGTATGTGTGGGCCAAAGACCGCCCTGAGATCTGGGAGGGAGAGC
CTCCGTGTCTCCCACCGAGGGACAGCCTGAACCAGAGCCTCAGCCAGGACCTCACCATGGC
CCCTGGCTCCACACTCTGGCTGTCCTGTGGGGTACCCCCTGACTCTGTGTCCAGGGGCCCC
CTCTCCTGGACCCATGTGCACCCCAAGGGGCCTAAGTCATTGCTGAGCCTAGAGCTGAAGGA
CGATCGCCCGGCCAGAGATATGTGGGTAATGGAGACGGGTCTGTTGTTGCCCCGGGCCACA
GCTCAAGACGCTGGAAAGTATTATTGTCACCGTGGCAACCTGACCATGTCATTCCACCTGGA
GATCACTGCTCGGCCAGTACTATGGCACTGGCTGCTGAGGACTGGTGGCTGGAAGGTCTCA
GCTGTGACTTTGGCTTATCTGATCTTCTGCCTGTGTTCCCTTGTGGGCATTCTTCATCTTCAAA
GAGCCCTGGTCCTGAGGAGGAAAAGAAAGCGAATGACTGACCCCACCAGGAGATTCTAACG
CGTCATCATCGATCCGGATTAGTCCAATTTGTTAAAGACAGGATATCAGTGGTCCAGGCTCTA
GTTTTGACTCAACAATATCACCAGCTGAAGCCTATAGAGTACGAGCCATAGATAAAATAAAAG
ATTTTATTTAGTCTCCAGAAAAAGGGGGGAATGAAAGACCCCACCTGTAGGTTTGGCAAGCTA
GCTTAAGTAACGCCATTTTGCAAGGCATGGAAAAATACATAACTGAGAATAGAGAAGTTCAGA
TCAAGGTCAGGAACAGATGGAACAGCTGAATATGGGCCAAACAGGATATCTGTGGTAAGCAG
TTCCTGCCCCGGCTCAGGGCCAAGAACAGATGGAACAGCTGAATATGGGCCAAACAGGATAT
CTGTGGTAAGCAGTTCCTGCCCCGGCTCAGGGCCAAGAACAGATGGTCCCCAGATGCGGTC
CAGCCCTCAGCAGTTTCTAGAGAACCATCAGATGTTTCCAGGGTGCCCCAAGGACCTGAAAT
GACCCTGTGCCTTATTTGAACTAACCAATCAGTTCGCTTCTCGCTTCTGTTCGCGCGCTTCTG
CTCCCCGAGCTCAATAAAAGAGCCCACAACCCCTCACTCGGGGCGCCAGTCCTCCGATTGAC
TGAGTCGCCCGGGTACCCGTGTATCCAATAAACCCTCTTGCAGTTGCATCCGACTTGTGGTCT
CGCTGTTCCTTGGGAGGGTCTCCTCTGAGTGATTGACTACCCGTCAGCGGGGGTCTTTCACA
CATGCAGCATGTATCAAAATTAATTTGGTTTTTTTTCTTAAGTATTTACATTAAATGGCCATAGT
ACTTAAAGTTACATTGGCTTCCTTGAAATAAACATGGAGTATTCAGAATGTGTCATAAATATTTC
TAATTTTAAGATAGTATCTCCATTGGCTTTCTACTTTTTCTTTTATTTTTTTTTGTCCTCTGTCTT
CCATTTGTTGTTGTTGTTGTTTGTTTGTTTGTTTGTTGGTTGGTTGGTTAATTTTTTTTTAAAGAT
CCTACACTATAGTTCAAGCTAGACTATTAGCTACTCTGTAACCCAGGGTGACCTTGAAGTCAT
GGGTAGCCTGCTGTTTTAGCCTTCCCACATCTAAGATTACAGGTATGAGCTATCATTTTTGGTA
TATTGATTGATTGATTGATTGATGTGTGTGTGTGTGATTGTGTTTGTGTGTGTGACTGTGAAAA
TGTGTGTATGGGTGTGTGTGAATGTGTGTATGTATGTGTGTGTGTGAGTGTGTGTGTGTGTGT
GTGCATGTGTGTGTGTGTGACTGTGTCTATGTGTATGACTGTGTGTGTGTGTGTGTGTGTGTG
TGTGTGTGTGTGTGTGTGTGTGTTGTGAAAAAATATTCTATGGTAGTGAGAGCCAACGCTCCG
GCTCAGGTGTCAGGTTGGTTTTTGAGACAGAGTCTTTCACTTAGCTTGGAATTCACTGGCCGT
CGTTTTACAACGTCGTGACTGGGAAAACCCTGGCGTTACCCAACTTAATCGCCTTGCAGCACA
TCCCCCTTTCGCCAGCTGGCGTAATAGCGAAGAGGCCCGCACCGATCGCCCTTCCCAACAGT
TGCGCAGCCTGAATGGCGAATGGCGCCTGATGCGGTATTTTCTCCTTACGCATCTGTGCGGT
ATTTCACACCGCATATGGTGCACTCTCAGTACAATCTGCTCTGATGCCGCATAGTTAAGCCAG
CCCCGACACCCGCCAACACCCGCTGACGCGCCCTGACGGGCTTGTCTGCTCCCGGCATCCG
CTTACAGACAAGCTGTGACCGTCTCCGGGAGCTGCATGTGTCAGAGGTTTTCACCGTCATCA
CCGAAACGCGCGATGACGAAAGGGCCTCGTGATACGCCTATTTTTATAGGTTAATGTCATGAT
AATAATGGTTTCTTAGACGTCAGGTGGCACTTTTCGGGGAAATGTGCGCGGAACCCCTATTTG
TTTATTTTTCTAAATACATTCAAATATGTATCCGCTCATGAGACAATAACCCTGATAAATGCTTC
AATAATATTGAAAAAGGAAGAGTATGAGTATTCAACATTTCCGTGTCGCCCTTATTCCCTTTTTT
GCGGCATTTTGCCTTCCTGTTTTTGCTCACCCAGAAACGCTGGTGAAAGTAAAAGATGCTGAA
GATCAGTTGGGTGCACGAGTGGGTTACATCGAACTGGATCTCAACAGCGGTAAGATCCTTGA
GAGTTTTCGCCCCGAAGAACGTTTTCCAATGATGAGCACTTTTAAAGTTCTGCTATGTGGCGC
GGTATTATCCCGTATTGACGCCGGGCAAGAGCAACTCGGTCGCCGCATACACTATTCTCAGA
ATGACTTGGTTGAGTACTCACCAGTCACAGAAAAGCATCTTACGGATGGCATGACAGTAAGAG
AATTATGCAGTGCTGCCATAACCATGAGTGATAACACTGCGGCCAACTTACTTCTGACAACGA
TCGGAGGACCGAAGGAGCTAACCGCTTTTTTGCACAACATGGGGGATCATGTAACTCGCCTT
GATCGTTGGGAACCGGAGCTGAATGAAGCCATACCAAACGACGAGCGTGACACCACGATGC
CTGTAGCAATGGCAACAACGTTGCGCAAACTATTAACTGGCGAACTACTTACTCTAGCTTCCC
GGCAACAATTAATAGACTGGATGGAGGCGGATAAAGTTGCAGGACCACTTCTGCGCTCGGCC
CTTCCGGCTGGCTGGTTTATTGCTGATAAATCTGGAGCCGGTGAGCGTGGGTCTCGCGGTAT
CATTGCAGCACTGGGGCCAGATGGTAAGCCCTCCCGTATCGTAGTTATCTACACGACGGGGA
GTCAGGCAACTATGGATGAACGAAATAGACAGATCGCTGAGATAGGTGCCTCACTGATTAAG
CATTGGTAACTGTCAGACCAAGTTTACTCATATATACTTTAGATTGATTTAAAACTTCATTTTTA
ATTTAAAAGGATCTAGGTGAAGATCCTTTTTGATAATCTCATGACCAAAATCCCTTAACGTGAG
TTTTCGTTCCACTGAGCGTCAGACCCCGTAGAAAAGATCAAAGGATCTTCTTGAGATCCTTTTT
TTCTGCGCGTAATCTGCTGCTTGCAAACAAAAAAACCACCGCTACCAGCGGTGGTTTGTTTGC
CGGATCAAGAGCTACCAACTCTTTTTCCGAAGGTAACTGGCTTCAGCAGAGCGCAGATACCA
AATACTGTCCTTCTAGTGTAGCCGTAGTTAGGCCACCACTTCAAGAACTCTGTAGCACCGCCT
ACATACCTCGCTCTGCTAATCCTGTTACCAGTGGCTGCTGCCAGTGGCGATAAGTCGTGTCTT
ACCGGGTTGGACTCAAGACGATAGTTACCGGATAAGGCGCAGCGGTCGGGCTGAACGGGGG
GTTCGTGCACACAGCCCAGCTTGGAGCGAACGACCTACACCGAACTGAGATACCTACAGCGT
GAGCATTGAGAAAGCGCCACGCTTCCCGAAGGGAGAAAGGCGGACAGGTATCCGGTAAGCG
GCAGGGTCGGAACAGGAGAGCGCACGAGGGAGCTTCCAGGGGGAAACGCCTGGTATCTTTA
TAGTCCTGTCGGGTTTCGCCACCTCTGACTTGAGCGTCGATTTTTGTGATGCTCGTCAGGGG
GGCGGAGCCTATGGAAAAACGCCAGCAACGCGGCCTTTTTACGGTTCCTGGCCTTTTGCTGG
CCTTTTGCTCACATGTTCTTTCCTGCGTTATCCCCTGATTCTGTGGATAACCGTATTACCGCCT
TTGAGTGAGCTGATACCGCTCGCCGCAGCCGAACGACCGAGCGCAGCGAGTCAGTGAGCGA
GGAAGCGGAAGAGCGCCCAATACGCAAACCGCCTCTCCCCGCGCGTTGGCCGATTCATTAAT
GCAGCTGGCACGACAGGTTTCCCGACTGGAAAGCGGGCAGTGAGCGCAACGCAATTAATGT
GAGTTAGCTCACTCATTAGGCACCCCAGGCTTTACACTTTATGCTTCCGGCTCGTATGTTGTG
TGGAATTGTGAGCGGATAACAATTTCACACAGGAAACAGCTATGACCATGATTACGCCAAGCT
TTGCTCTTAGGAGTTTCCTAATACATCCCAAACTCAAATATATAAAGCATTTGACTTGTTCTATG
CCCTAGGGGGCGGGGGGAAGCTAAGCCAGCTTTTTTTAACATTTAAAATGTTAATTCCATTTT
AAATGCACAGATGTTTTTATTTCATAAGGGTTTCAATGTGCATGAATGCTGCAATATTCCTGTT
ACCAAAGCTAGTATAAATAAAAATAGATAAACGTGGAAATTACTTAGAGTTTCTGTCATTAACG
TTTCCTTCCTCAGTTGACAACATAAATGCGCTGCTGAGCAAGCCAGTTTGCATCTGTCAGGAT
CAATTTCCCATTATGCCAGTCATATTAATTACTAGTCAATTAGTTGATTTTTATTTTTGACATATA
CATGTGAA
SEQ ID NO: 18, (nucleotide sequence of F_{v′}Fᵥₗₛ with XhoI/SalI linkers,
(wobbled codons lowercase in F_{v′}))
ctcgagGGcGTcCAaGTcGAaACcATtagtCCcGGcGAtGGcaGaACaTTtCCtAAaaGgGGaCAaACaTG
tGTcGTcCAtTAtACaGGcATGtTgGAgGAcGGcAAaAAgGTgGAcagtagtaGaGAtcGcAAtAAaCCtTTc
AAaTTcATGtTgGGaAAaCAaGAaGTcATtaGgGGaTGGGAgGAgGGcGTgGCtCAaATGtccGTcGGc
CAacGcGCtAAgCTcACcATcagcCCcGAcTAcGCaTAcGGcGCtACcGGaCAtCCcGGaATtATtCCcC
CtCAcGCtACctTgGTgTTtGAcGTcGAaCTgtTgAAgCTcGAagtcgagggagtgcaggtggaaaccatctccccag
gagacgggcgcaccttccccaagcgcggccagacctgcgtggtgcactacaccgggatgcttgaagatggaaagaaagttgattcctc
ccgggacagaaacaagccctttaagtttatgctaggcaagcaggaggtgatccgaggctgggaagaaggggttgcccagatgagtgtg
ggtcagagagccaaactgactatatctccagattatgcctatggtgccactgggcacccaggcatcatcccaccacatgccactctcgtctt
cgatgtggagcttctaaaactggaatctggcggtggatccggagtcgag
SEQ ID NO: 19, (F_{v′}F_{VLS} amino acid sequence)
GlyValGlnValGluThrIleSerProGlyAspGlyArgThrPheProLysArgGlyGlnThrCysValValHisTyrThrGlyMet
LeuGluAspGlyLysLysValAspSerSerArgAspArgAsnLysProPheLysPheMetLeuGlyLysGlnGluValIle
ArgGlyTrpGluGluGlyValAlaGlnMetSerValGlyGlnArgAlaLysLeuThrIleSerProAspTyrAlaTyrGlyAlaThr
GlyHisProGlyIleIleProProHisAlaThrLeuValPheAspValGluLeuLeuLysLeuGlu (ValGlu)
GlyValGlnValGluThrIleSerProGlyAspGlyArgThrPheProLysArgGlyGlnThrCysValValHisTyrThrGlyMet
LeuGluAspGlyLysLysValAspSerSerArgAspArgAsnLysProPheLysPheMetLeuGlyLysGlnGluValIle
ArgGlyTrpGluGluGlyValAlaGlnMetSerValGlyGlnArgAlaLysLeuThrIleSerProAspTyrAlaTyrGlyAlaThr
GlyHisProGlyIleIleProProHisAlaThrLeuValPheAspValGluLeuLeuLysLeuGlu-SerGlyGlyGlySerGly
SEQ ID NO: 20, FKBP12v36 (res. 2-108)
SGGGSG Linker (6 aa) (SEQ ID NO: 289)
ΔCasp9 (res. 135-416)
ATGCTCGAGGGAGTGCAGGTGGAgACtATCTCCCCAGGAGACGGGCGCACCTTCCCCAAGCG
CGGCCAGACCTGCGTGGTGCACTACACCGGGATGCTTGAAGATGGAAAGAAAGTTGATTCCT
CCCGGGACAGAAACAAGCCCTTTAAGTTTATGCTAGGCAAGCAGGAGGTGATCCGAGGCTGG
GAAGAAGGGGTTGCCCAGATGAGTGTGGGTCAGAGAGCCAAACTGACTATATCTCCAGATTA
TGCCTATGGTGCCACTGGGCACCCAGGCATCATCCCACCACATGCCACTCTCGTCTTCGATG
TGGAGCTTCTAAAACTGGAATCTGGCGGTGGATCCGGAGTCGACGGATTTGGTGATGTCGGT
GCTCTTGAGAGTTTGAGGGGAAATGCAGATTTGGCTTACATCCTGAGCATGGAGCCCTGTGG
CCACTGCCTCATTATCAACAATGTGAACTTCTGCCGTGAGTCCGGGCTCCGCACCCGCACTG
GCTCCAACATCGACTGTGAGAAGTTGCGGCGTCGCTTCTCCTCGCTGCATTTCATGGTGGAG
GTGAAGGGCGACCTGACTGCCAAGAAAATGGTGCTGGCTTTGCTGGAGCTGGCGCgGCAGG
ACCACGGTGCTCTGGACTGCTGCGTGGTGGTCATTCTCTCTCACGGCTGTCAGGCCAGCCAC
CTGCAGTTCCCAGGGGCTGTCTACGGCACAGATGGATGCCCTGTGTCGGTCGAGAAGATTGT
GAACATCTTCAATGGGACCAGCTGCCCCAGCCTGGGAGGGAAGCCCAAGCTCTTTTTCATCC
AGGCCTGTGGTGGGGAGCAGAAAGACCATGGGTTTGAGGTGGCCTCCACTTCCCCTGAAGA
CGAGTCCCCTGGCAGTAACCCCGAGCCAGATGCCACCCCGTTCCAGGAAGGTTTGAGGACC
TTCGACCAGCTGGACGCCATATCTAGTTTGCCCACACCCAGTGACATCTTTGTGTCCTACTCT
ACTTTCCCAGGTTTTGTTTCCTGGAGGGACCCCAAGAGTGGCTCCTGGTACGTTGAGACCCT
GGACGACATCTTTGAGCAGTGGGCTCACTCTGAAGACCTGCAGTCCCTCCTGCTTAGGGTCG
CTAATGCTGTTTCGGTGAAAGGGATTTATAAACAGATGCCTGGTTGCTTTAATTTCCTCCGGAA
AAAACTTTTCTTTAAAACATCA
SEQ ID NO: 21, FKBP12v36 (res. 2-108)
G V Q V E T I S P G D G R T F P K R G Q T C V V H Y T G M L E D G K K
V D S S R D R N K P F K F M L G K Q E V I R G W E E G V A Q M S V G Q
R A K L T I S P D Y A Y G A T G H P G I I P P H A T L V F D V E L L K L E
SEQ ID NO: 22, ΔCasp9 (res. 135-416)
G F G D V G A L E S L R G N A D L A Y I L S M E P C G H C L I I N N V N
F C R E S G L R T R T G S N I D C E K L R R R F S S L H F M V E V K G D
L T A K K M V L A L L E L A R Q D H G A L D C C V V V I L S H G C Q A S
H L Q F P G A V Y G T D G C P V S V E K I V N I F N G T S C P S L G G K
P K L F F I Q A C G G E Q K D H G F E V A S T S P E D E S P G S N P E P
D A T P F Q E G L R T F D Q L D A I S S L P T P S D I F V S Y S T F P G
F V S W R D P K S G S W Y V E T L D D I F E Q W A H S E D L Q S L L L
R V A N A V S V K G I Y K Q M P G C F N F L R K K L F F K T S
SEQ ID NO: 23, ΔCasp9 (res. 135-416) D330A, nucleotide sequence
GGATTTGGTGATGTCGGTGCTCTTGAGAGTTTGAGGGGAAATGCAGATTTGGCTTACATCCTG
AGCATGGAGCCCTGTGGCCACTGCCTCATTATCAACAATGTGAACTTCTGCCGTGAGTCCGG
GCTCCGCACCCGCACTGGCTCCAACATCGACTGTGAGAAGTTGCGGCGTCGCTTCTCCTCGC
TGCATTTCATGGTGGAGGTGAAGGGCGACCTGACTGCCAAGAAAATGGTGCTGGCTTTGCTG
GAGCTGGCGCgGCAGGACCACGGTGCTCTGGACTGCTGCGTGGTGGTCATTCTCTCTCACG
GCTGTCAGGCCAGCCACCTGCAGTTCCCAGGGGCTGTCTACGGCACAGATGGATGCCCTGT
GTCGGTCGAGAAGATTGTGAACATCTTCAATGGGACCAGCTGCCCCAGCCTGGGAGGGAAG
CCCAAGCTCTTTTTCATCCAGGCCTGTGGTGGGGAGCAGAAAGACCATGGGTTTGAGGTGGC
CTCCACTTCCCCTGAAGACGAGTCCCCTGGCAGTAACCCCGAGCCAGATGCCACCCCGTTCC
AGGAAGGTTTGAGGACCTTCGACCAGCTGGCCGCCATATCTAGTTTGCCCACACCCAGTGAC
ATCTTTGTGTCCTACTCTACTTTCCCAGGTTTTGTTTCCTGGAGGGACCCCAAGAGTGGCTCC
TGGTACGTTGAGACCCTGGACGACATCTTTGAGCAGTGGGCTCACTCTGAAGACCTGCAGTC
CCTCCTGCTTAGGGTCGCTAATGCTGTTTCGGTGAAAGGGATTTATAAACAGATGCCTGGTTG
CTTTAATTTCCTCCGGAAAAAACTTTTCTTTAAAACATCA
SEQ ID NO: 24, ΔCasp9 (res. 135-416) D330A, amino acid sequence
G F G D V G A L E S L R G N A D L A Y I L S M E P C G H C L I I N N V N
F C R E S G L R T R T G S N I D C E K L R R R F S S L H F M V E V K G D
L T A K K M V L A L L E L A R Q D H G A L D C C V V V I L S H G C Q A S
H L Q F P G A V Y G T D G C P V S V E K I V N I F N G T S C P S L G G K
P K L F F I Q A C G G E Q K D H G F E V A S T S P E D E S P G S N P E P
D A T P F Q E G L R T F D Q L A A I S S L P T P S D I F V S Y S T F P G F
V S W R D P K S G S W Y V E T L D D I F E Q W A H S E D L Q S L L L R
V A N A V S V K G I Y K Q M P G C F N F L R K K L F F K T S
SEQ ID NO: 25, ΔCasp9 (res. 135-416) N405Q nucleotide sequence
GGATTTGGTGATGTCGGTGCTCTTGAGAGTTTGAGGGGAAATGCAGATTTGGCTTACATCCTG
AGCATGGAGCCCTGTGGCCACTGCCTCATTATCAACAATGTGAACTTCTGCCGTGAGTCCGG
GCTCCGCACCCGCACTGGCTCCAACATCGACTGTGAGAAGTTGCGGCGTCGCTTCTCCTCGC
TGCATTTCATGGTGGAGGTGAAGGGCGACCTGACTGCCAAGAAAATGGTGCTGGCTTTGCTG
GAGCTGGCGCgGCAGGACCACGGTGCTCTGGACTGCTGCGTGGTGGTCATTCTCTCTCACG
GCTGTCAGGCCAGCCACCTGCAGTTCCCAGGGGCTGTCTACGGCACAGATGGATGCCCTGT
GTCGGTCGAGAAGATTGTGAACATCTTCAATGGGACCAGCTGCCCCAGCCTGGGAGGGAAG
CCCAAGCTCTTTTTCATCCAGGCCTGTGGTGGGGAGCAGAAAGACCATGGGTTTGAGGTGGC
CTCCACTTCCCCTGAAGACGAGTCCCCTGGCAGTAACCCCGAGCCAGATGCCACCCCGTTCC
AGGAAGGTTTGAGGACCTTCGACCAGCTGGACGCCATATCTAGTTTGCCCACACCCAGTGAC
ATCTTTGTGTCCTACTCTACTTTCCCAGGTTTTGTTTCCTGGAGGGACCCCAAGAGTGGCTCC
TGGTACGTTGAGACCCTGGACGACATCTTTGAGCAGTGGGCTCACTCTGAAGACCTGCAGTC
CCTCCTGCTTAGGGTCGCTAATGCTGTTTCGGTGAAAGGGATTTATAAACAGATGCCTGGTTG
CTTTCAGTTCCTCCGGAAAAAACTTTTCTTTAAAACATCA
SEQ ID NO: 26, ΔCasp9 (res. 135-416) N405Q amino acid sequence
G F G D V G A L E S L R G N A D L A Y I L S M E P C G H C L I I N N V N
F C R E S G L R T R T G S N I D C E K L R R R F S S L H F M V E V K G D
L T A K K M V L A L L E L A R Q D H G A L D C C V V V I L S H G C Q A S
H L Q F P G A V Y G T D G C P V S V E K I V N I F N G T S C P S L G G K
P K L F F I Q A C G G E Q K D H G F E V A S T S P E D E S P G S N P E P
D A T P F Q E G L R T F D Q L D A I S S L P T P S D I F V S Y S T F P G
F V S W R D P K S G S W Y V E T L D D I F E Q W A H S E D L Q S L L L
R V A N A V S V K G I Y K Q M P G C F Q F L R K K L F F K T S
SEQ ID NO: 27, ΔCasp9 (res. 135-416) D330A N405Q nucleotide sequence
GGATTTGGTGATGTCGGTGCTCTTGAGAGTTTGAGGGGAAATGCAGATTTGGCTTACATCCTG
AGCATGGAGCCCTGTGGCCACTGCCTCATTATCAACAATGTGAACTTCTGCCGTGAGTCCGG
GCTCCGCACCCGCACTGGCTCCAACATCGACTGTGAGAAGTTGCGGCGTCGCTTCTCCTCGC
TGCATTTCATGGTGGAGGTGAAGGGCGACCTGACTGCCAAGAAAATGGTGCTGGCTTTGCTG
GAGCTGGCGCgGCAGGACCACGGTGCTCTGGACTGCTGCGTGGTGGTCATTCTCTCTCACG
GCTGTCAGGCCAGCCACCTGCAGTTCCCAGGGGCTGTCTACGGCACAGATGGATGCCCTGT
GTCGGTCGAGAAGATTGTGAACATCTTCAATGGGACCAGCTGCCCCAGCCTGGGAGGGAAG
CCCAAGCTCTTTTTCATCCAGGCCTGTGGTGGGGAGCAGAAAGACCATGGGTTTGAGGTGGC
CTCCACTTCCCCTGAAGACGAGTCCCCTGGCAGTAACCCCGAGCCAGATGCCACCCCGTTCC
AGGAAGGTTTGAGGACCTTCGACCAGCTGGCCGCCATATCTAGTTTGCCCACACCCAGTGAC
ATCTTTGTGTCCTACTCTACTTTCCCAGGTTTTGTTTCCTGGAGGGACCCCAAGAGTGGCTCC
TGGTACGTTGAGACCCTGGACGACATCTTTGAGCAGTGGGCTCACTCTGAAGACCTGCAGTC
CCTCCTGCTTAGGGTCGCTAATGCTGTTTCGGTGAAAGGGATTTATAAACAGATGCCTGGTTG
CTTTCAGTTCCTCCGGAAAAAACTTTTCTTTAAAACATCA
SEQ ID NO: 28, ΔCasp9 (res. 135-416) D330A N405Q amino acid sequence
G F G D V G A L E S L R G N A D L A Y I L S M E P C G H C L I I N N V N
F C R E S G L R T R T G S N I D C E K L R R R F S S L H F M V E V K G D
L T A K K M V L A L L E L A R Q D H G A L D C C V V V I L S H G C Q A S
H L Q F P G A V Y G T D G C P V S V E K I V N I F N G T S C P S L G G K
P K L F F I Q A C G G E Q K D H G F E V A S T S P E D E S P G S N P E P
D A T P F Q E G L R T F D Q L A A I S S L P T P S D I F V S Y S T F P G F
V S W R D P K S G S W Y V E T L D D I F E Q W A H S E D L Q S L L L R
V A N A V S V K G I Y K Q M P G C F Q F L R K K L F F K T S
SEQ ID NO: 29, FKBPv36 (Fv1) nucleotide sequence
GGCGTTCAAGTAGAAACAATCAGCCCAGGAGACGGAAGGACTTTCCCCAAACGAGGCCAAAC
ATGCGTAGTTCATTATACTGGGATGCTCGAAGATGGAAAAAAAGTAGATAGTAGTAGAGACCG
AAACAAACCATTTAAATTTATGTTGGGAAAACAAGAAGTAATAAGGGGCTGGGAAGAAGGTGT
AGCACAAATGTCTGTTGGCCAGCGCGCAAAACTCACAATTTCTCCTGATTATGCTTACGGAGC
TACCGGCCACCCCGGCATCATACCCCCTCATGCCACACTGGTGTTTGACGTCGAATTGCTCA
AACTGGAA
SEQ ID NO: 30, FKBPv36 (Fv1) amino acid sequence
GVQVETISPGDGRTFPKRGQTCVVHYTGMLEDGKKVDSSRDRNKPFKFMLGKQEVIRGWEEGV
AQMSVGQRAKLTISPDYAYGATGHPGIIPPHATLVFDVELLKLE
SEQ ID NO: 31, FKBPv36 (Fv2) nucleotide sequence
GGaGTgCAgGTgGAgACgATtAGtCCtGGgGAtGGgAGaACcTTtCCaAAgCGcGGtCAgACcTGtGTt
GTcCAcTAcACcGGtATGCTgGAgGAcGGgAAgAAgGTgGActcTtcacGcGAtCGcAAtAAgCCtTTcAA
gTTcATGcTcGGcAAgCAgGAgGTgATccGGGGgTGGGAgGAgGGcGTgGCtCAgATGTCgGTcGGg
CAaCGaGCgAAgCTtACcATcTCaCCcGAcTAcGCgTAtGGgGCaACgGGgCAtCCgGGaATtATcCCt
CCcCAcGCtACgCTcGTaTTcGAtGTgGAgcTcttgAAgCTtGag
SEQ ID NO: 32, FKBPv36 (Fv2) amino acid sequence
GVQVETISPGDGRTFPKRGQTCVVHYTGMLEDGKKVDSSRDRNKPFKFMLGKQEVIRGWEEGV
AQMSVGQRAKLTISPDYAYGATGHPGIIPPHATLVFDVELLKLE
SEQ ID NO: 33, ΔCD19 nucleotide sequence
ATGCCCCCTCCTAGACTGCTGTTTTTCCTGCTCTTTCTCACCCCAATGGAAGTTAGACCTGAG
GAACCACTGGTCGTTAAAGTGGAAGAAGGTGATAATGCTGTCCTCCAATGCCTTAAAGGGAC
CAGCGACGGACCAACGCAGCAACTGACTTGGAGCCGGGAGTCCCCTCTCAAGCCGTTTCTC
AAGCTGTCACTTGGCCTGCCAGGTCTTGGTATTCACATGCGCCCCCTTGCCATTTGGCTCTTC
ATATTCAATGTGTCTCAACAAATGGGTGGATTCTACCTTTGCCAGCCCGGCCCCCCTTCTGAG
AAAGCTTGGCAGCCTGGATGGACCGTCAATGTTGAAGGCTCCGGTGAGCTGTTTAGATGGAA
TGTGAGCGACCTTGGCGGACTCGGTTGCGGACTGAAAAATAGGAGCTCTGAAGGACCCTCTT
CTCCCTCCGGTAAGTTGATGTCACCTAAGCTGTACGTGTGGGCCAAGGACCGCCCCGAAATC
TGGGAGGGCGAGCCTCCATGCCTGCCGCCTCGCGATTCACTGAACCAGTCTCTGTCCCAGG
ATCTCACTATGGCGCCCGGATCTACTCTTTGGCTGTCTTGCGGCGTTCCCCCAGATAGCGTG
TCAAGAGGACCTCTGAGCTGGACCCACGTACACCCTAAGGGCCCTAAGAGCTTGTTGAGCCT
GGAACTGAAGGACGACAGACCCGCACGCGATATGTGGGTAATGGAGACCGGCCTTCTGCTC
CCTCGCGCTACCGCACAGGATGCAGGGAAATACTACTGTCATAGAGGGAATCTGACTATGAG
CTTTCATCTCGAAATTACAGCACGGCCCGTTCTTTGGCATTGGCTCCTCCGGACTGGAGGCT
GGAAGGTGTCTGCCGTAACACTCGCTTACTTGATTTTTTGCCTGTGTAGCCTGGTTGGGATCC
TGCATCTTCAGCGAGCCCTTGTATTGCGCCGAAAAAGAAAACGAATGACTGACCCTACACGA
CGATTCTGA
SEQ ID NO: 34, ΔCD19 amino acid sequence
MPPPRLLFFLLFLTPMEVRPEEPLVVKVEEGDNAVLQCLKGTSDGPTQQLTWSRESPLKPFLKLS
LGLPGLGIHMRPLAIWLFIFNVSQQMGGFYLCQPGPPSEKAWQPGWTVNVEGSGELFRWNVSDL
GGLGCGLKNRSSEGPSSPSGKLMSPKLYVWAKDRPEIWEGEPPCLPPRDSLNQSLSQDLTMAP
GSTLWLSCGVPPDSVSRGPLSWTHVHPKGPKSLLSLELKDDRPARDMWVMETGLLLPRATAQD
AGKYYCHRGNLTMSFHLEITARPVLWHWLLRTGGWKVSAVTLAYLIFCLCSLVGILHLQRALVLRR
KRKRMTDPTRRF*
Codon optimized iCasp9-N405Q-2A-ΔCD19 sequence: (the .co following the name of a nucleotide
sequence indicates that it is codon optimized (or the amino acid sequence coded by the codon-
optimized nucleotide sequence).
SEQ-ID NO: 35, FKBPv36.co (Fv3) nucleotide sequence
ATGCTGGAGGGAGTGCAGGTGGAGACTATTAGCCCCGGAGATGGCAGAACATTCCCCAAAA
GAGGACAGACTTGCGTCGTGCATTATACTGGAATGCTGGAAGACGGCAAGAAGGTGGACAG
CAGCCGGGACCGAAACAAGCCCTTCAAGTTCATGCTGGGGAAGCAGGAAGTGATCCGGGGC
TGGGAGGAAGGAGTCGCACAGATGTCAGTGGGACAGAGGGCCAAACTGACTATTAGCCCAG
ACTACGCTTATGGAGCAACCGGCCACCCCGGGATCATTCCCCCTCATGCTACACTGGTCTTC
GATGTGGAGCTGCTGAAGCTGGAA
SEQ ID NO: 36, FKBPv36.co (Fv3) amino acid sequence
MLEGVQVETISPGDGRTFPKRGQTCVVHYTGMLEDGKKVDSSRDRNKPFKFMLGKQEVIRGWE
EGVAQMSVGQRAKLTISPDYAYGATGHPGIIPPHATLVFDVELLKLE
SEQ ID NO: 37, Linker.co nucleotide sequence
AGCGGAGGAGGATCCGGA
SEQ ID NO: 38, Linker.co amino acid sequence
SGGGSG
SEQ IDNO: 39, Caspase-9.co nucleotide sequence
GTGGACGGGTTTGGAGATGTGGGAGCCCTGGAATCCCTGCGGGGCAATGCCGATCTGGCTT
ACATCCTGTCTATGGAGCCTTGCGGCCACTGTCTGATCATTAACAATGTGAACTTCTGCAGAG
AGAGCGGGCTGCGGACCAGAACAGGATCCAATATTGACTGTGAAAAGCTGCGGAGAAGGTT
CTCTAGTCTGCACTTTATGGTCGAGGTGAAAGGCGATCTGACCGCTAAGAAAATGGTGCTGG
CCCTGCTGGAACTGGCTCGGCAGGACCATGGGGCACTGGATTGCTGCGTGGTCGTGATCCT
GAGTCACGGCTGCCAGGCTTCACATCTGCAGTTCCCTGGGGCAGTCTATGGAACTGACGGCT
GTCCAGTCAGCGTGGAGAAGATCGTGAACATCTTCAACGGCACCTCTTGCCCAAGTCTGGGC
GGGAAGCCCAAACTGTTCTTTATTCAGGCCTGTGGAGGCGAGCAGAAAGATCACGGCTTCGA
AGTGGCTAGCACCTCCCCCGAGGACGAATCACCTGGAAGCAACCCTGAGCCAGATGCAACC
CCCTTCCAGGAAGGCCTGAGGACATTTGACCAGCTGGATGCCATCTCAAGCCTGCCCACACC
TTCTGACATTTTCGTCTCTTACAGTACTTTCCCTGGATTTGTGAGCTGGCGCGATCCAAAGTCA
GGCAGCTGGTACGTGGAGACACTGGACGATATCTTTGAGCAGTGGGCCCATTCTGAAGACCT
GCAGAGTCTGCTGCTGCGAGTGGCCAATGCTGTCTCTGTGAAGGGGATCTACAAACAGATGC
CAGGATGCTTCCAGTTTCTGAGAAAGAAACTGTTCTTTAAGACCTCCGCATCTAGGGCC
SEQ ID NO: 40, Caspase-9.co amino acid sequence
VDGFGDVGALESLRGNADLAYILSMEPCGHCLIINNVNFCRESGLRTRTGSNIDCEKLRRRFSSLH
FMVEVKGDLTAKKMVLALLELARQDHGALDCCVVVILSHGCQASHLQFPGAVYGTDGCPVSVEKI
VNIFNGTSCPSLGGKPKLFFIQACGGEQKDHGFEVASTSPEDESPGSNPEPDATPFQEGLRTFDQ
LDAISSLPTPSDIFVSYSTFPGFVSWRDPKSGSWYVETLDDIFEQWAHSEDLQSLLLRVANAVSVK
GIYKQMPGCFQFLRKKLFFKTSASRA
SEQ ID NO: 41, Linker.co nucleotide sequence
CCGCGG
SEQ ID NO: 42, Linker.co amino acid sequence
PR
SEQ ID NO: 308: T2A.co nucleotide sequence
GAAGGCCGAGGGAGCCTGCTGACATGTGGCGATGTGGAGGAAAACCCAGGACCA
SEQ ID NO: 43: T2A.co amino acid sequence
EGRGSLLTCGDVEENPGP
SEQ ID NO: 309: Δ CD19.co nucleotide sequence
ATGCCACCACCTCGCCTGCTGTTCTTTCTGCTGTTCCTGACACCTATGGAGGTGCGACCTGA
GGAACCACTGGTCGTGAAGGTCGAGGAAGGCGACAATGCCGTGCTGCAGTGCCTGAAAGGC
ACTTCTGATGGGCCAACTCAGCAGCTGACCTGGTCCAGGGAGTCTCCCCTGAAGCCTTTTCT
GAAACTGAGCCTGGGACTGCCAGGACTGGGAATCCACATGCGCCCTCTGGCTATCTGGCTGT
TCATCTTCAACGTGAGCCAGCAGATGGGAGGATTCTACCTGTGCCAGCCAGGACCACCATCC
GAGAAGGCCTGGCAGCCTGGATGGACCGTCAACGTGGAGGGGTCTGGAGAACTGTTTAGGT
GGAATGTGAGTGACCTGGGAGGACTGGGATGTGGGCTGAAGAACCGCTCCTCTGAAGGCCC
AAGTTCACCCTCAGGGAAGCTGATGAGCCCAAAACTGTACGTGTGGGCCAAAGATCGGCCCG
AGATCTGGGAGGGAGAACCTCCATGCCTGCCACCTAGAGACAGCCTGAATCAGAGTCTGTCA
CAGGATCTGACAATGGCCCCCGGGTCCACTCTGTGGCTGTCTTGTGGAGTCCCACCCGACA
GCGTGTCCAGAGGCCCTCTGTCCTGGACCCACGTGCATCCTAAGGGGCCAAAAAGTCTGCT
GTCACTGGAACTGAAGGACGATCGGCCTGCCAGAGACATGTGGGTCATGGAGACTGGACTG
CTGCTGCCACGAGCAACCGCACAGGATGCTGGAAAATACTATTGCCACCGGGGCAATCTGAC
AATGTCCTTCCATCTGGAGATCACTGCAAGGCCCGTGCTGTGGCACTGGCTGCTGCGAACCG
GAGGATGGAAGGTCAGTGCTGTGACACTGGCATATCTGATCTTTTGCCTGTGCTCCCTGGTG
GGCATTCTGCATCTGCAGAGAGCCCTGGTGCTGCGGAGAAAGAGAAAGAGAATGACTGACC
CAACAAGAAGGTTTTGA
SEQ ID NO: 310: Δ CD19.co amino acid sequence
MPPPRLLFFLLFLTPMEVRPEEPLVVKVEEGDNAVLQCLKGTSDGPTQQLTWSRESPLKPFLKLS
LGLPGLGIHMRPLAIWLFIFNVSQQMGGFYLCQPGPPSEKAWQPGWTVNVEGSGELFRWNVSDL
GGLGCGLKNRSSEGPSSPSGKLMSPKLYVWAKDRPEIWEGEPPCLPPRDSLNQSLSQDLTMAP
GSTLWLSCGVPPDSVSRGPLSWTHVHPKGPKSLLSLELKDDRPARDMWVMETGLLLPRATAQD
AGKYYCHRGNLTMSFHLEITARPVLWHWLLRTGGWKVSAVTLAYLIFCLCSLVGILHLQRALVLRR
KRKRMTDPTRRF*

TABLE 6
Additional Examples of Caspase-9 Variants

| iCasp9 Variants | DNA sequence | Amino acid sequence |
|---|---|---|
| Fv-L-Caspase9 WT-2A | Fv disclosed as SEQ ID NO: 311, | Fv disclosed as SEQ ID NO: 314, |
| | Linker disclosed as SEQ ID NO: 312, | Linker disclosed as SEQ ID NO: |
| | iCasp9 disclose as SEQ ID NO: 44 | 315, iCasp9 disclose as SEQ ID |
| | and T2A disclosed as SEQ ID NO: 313 | NO: 45 and T2A disclosed as SEQ |
| | (Fv)ATGCTCGAGGGAGTGCAGGTGG | ID NO: 316 |
| | AgACtATCTCCCCAGGAGACGGGCG | (Fv)MLEGVQVETISPGDGRTFPKRG |
| | CACCTTCCCCAAGCGCGGCCAGACC | QTCVVHYTGMLEDGKKVDSSRDRN |
| | TGCGTGGTGCACTACACCGGGATGC | KPFKFMLGKQEVIR |
| | TTGAAGATGGAAAGAAAGTTGATTCC | GWEEGVAQMSVGQRAKLTISPDYA |
| | TCCCGGGACAGAAACAAGCCCTTTA | YGATGHPGIIPPHATLVFDVELLKLE- |
| | AGTTTATGCTAGGCAAGCAGGAGGT | (linker)SGGGSG-(iCasp9)VDGF |
| | GATCCGAGGCTGGGAAGAAGGGGT | GDVGALESLRGNADLAYILSMEPC |
| | TGCCCAGATGAGTGTGGGTCAGAGA | GHCLIINNVNFCRESGLRTRTGSNID |
| | GCCAAACTGACTATATCTCCAGATTA | CEKLRRRFSS |
| | TGCCTATGGTGCCACTGGGCACCCA | LHFMVEVKGDLTAKKMVLALLELAR |
| | GGCATCATCCCACCACATGCCACTC | QDHGALDCCVVVILSHGCQASHLQ |
| | TCGTCTTCGATGTGGAGCTTCTAAAA | FPGAVYGTDGC |
| | CTGGA- | PVSVEKIVNIFNGTSCPSLGGKPKLF |
| | (linker)TCTGGCGGTGGATCCGGA- | FIQACGGEQKDHGFEVASTSPEDE |
| | (iCasp9)GTCGACGGATTTGGTGATGT | SPGSNPEPDA |
| | CGGTGCTCTTGAGAGTTTGAGGGGA | TPFQEGLRTFDQLDAISSLPTPSDIF |
| | AATGCAGATTTGGCTTACATCCTGAG | VSYSTFPGFVSWRDPKSGSVVYVET |
| | CATGGAGCCCTGTGGCCACTGCCTC | LDDIFEQWAH |
| | ATTATCAACAATGTGAACTTCTGCCG | SEDLQSLLLRVANAVSVKGIYKQMP |
| | TGAGTCCGGGCTCCGCACCCGCACT | GCFNFLRKKLFFKTSASRA- |
| | GGCTCCAACATCGACTGTGAGAAGT | EGRGSLLTCGDVEENP |
| | TGCGGCGTCGCTTCTCCTCGCTGCA | GP- |
| | TTTCATGGTGGAGGTGAAGGGCGAC | |
| | CTGACTGCCAAGAAAATGGTGCTGG | |
| | CTTTGCTGGAGCTGGCGCGGCAGG | |
| | ACCACGGTGCTCTGGACTGCTGCGT | |
| | GGTGGTCATTCTCTCTCACGGCTGT | |
| | CAGGCCAGCCACCTGCAGTTCCCAG | |
| | GGGCTGTCTACGGCACAGATGGATG | |
| | CCCTGTGTCGGTCGAGAAGATTGTG | |
| | AACATCTTCAATGGGACCAGCTGCC | |
| | CCAGCCTGGGAGGGAAGCCCAAGC | |
| | TCTTTTTCATCCAGGCCTGTGGTGG | |
| | GGAGCAGAAAGACCATGGGTTTGAG | |
| | GTGGCCTCCACTTCCCCTGAAGACG | |
| | AGTCCCCTGGCAGTAACCCCGAGCC | |
| | AGATGCCACCCCGTTCCAGGAAGGT | |
| | TTGAGGACCTTCGACCAGCTGGACG | |
| | CCATATCTAGTTTGCCCACACCCAGT | |
| | GACATCTTTGTGTCCTACTCTACTTT | |
| | CCCAGGTTTTGTTTCCTGGAGGGAC | |
| | CCCAAGAGTGGCTCCTGGTACGTTG | |
| | AGACCCTGGACGACATCTTTGAGCA | |
| | GTGGGCTCACTCTGAAGACCTGCAG | |
| | TCCCTCCTGCTTAGGGTCGCTAATG | |
| | CTGTTTCGGTGAAAGGGATTTATAAA | |
| | CAGATGCCTGGTTGCTTTAATTTCCT | |
| | CCGGAAAAAACTTTTCTTTAAAACAT | |
| | CAGCTAGCAGAGCC-(T2A)- | |
| | GAGGGCAGGGGAAGTCTTCTAACAT | |
| | GCGGGGACGTGGAGGAAAATCCCG | |
| | GGCCC | |
| Fv-L-iCaspase9 WT | Fv disclosed as SEQ ID NO: 317, | iCaspase9 disclosed as SEQ ID |
| codon optimized-T2A | Linker disclosed as SEQ ID NO: 318, | NO: 47 and T2A disclosed as SEQ |
| codon optimized | iCasp9 disclose as SEQ ID NO: 46 | ID NO: 320 |
| | and T2A disclosed as SEQ ID NO: 319 | (Fv-L)- |
| | (Fv)- | VDGFGDVGALESLRGNADLAYILSM |
| | GGAGTGCAGGTGGAGACTATTAGCC | EPCGHCLIINNVNFCRESGLRTRTG |
| | CCGGAGATGGCAGAACATTCCCCAA | SNIDCEKLRRRFSS |
| | AAGAGGACAGACTTGCGTCGTGCAT | LHFMVEVKGDLTAKKMVLALLELAR |
| | TATACTGGAATGCTGGAAGACGGCA | QDHGALDCCVVVILSHGCQASHLQ |
| | AGAAGGTGGACAGCAGCCGGGACC | FPGAVYGTDGC |
| | GAAACAAGCCCTTCAAGTTCATGCT | PVSVEKIVNIFNGTSCPSLGGKPKLF |
| | GGGGAAGCAGGAAGTGATCCGGGG | FIQACGGEQKDHGFEVASTSPEDE |
| | CTGGGAGGAAGGAGTCGCACAGAT | SPGSNPEPDA |
| | GTCAGTGGGACAGAGGGCCAAACT | TPFQEGLRTFDQLDAISSLPTPSDIF |
| | GACTATTAGCCCAGACTACGCTTAT | VSYSTFPGFVSWRDPKSGSVVYVET |
| | GGAGCAACCGGCCACCCCGGGATC | LDDIFEQWAH |
| | ATTCCCCCTCATGCTACACTGGTCTT | SEDLQSLLLRVANAVSVKGIYKQMP |
| | CGATGTGGAGCTGCTGAAGCTGGAA- | GCFNFLRKKLFFKTSASRA- |
| | (L)-AGCGGAGGAGGATCCGGA- | EGRGSLLTCGDVEENP |
| | (iCasp9)- | GP-(T2A) |
| | GTGGACGGGTTTGGAGATGTGGGA | |
| | GCCCTGGAATCCCTGCGGGGCAAT | |
| | GCCGATCTGGCTTACATCCTGTCTAT | |
| | GGAGCCTTGCGGCCACTGTCTGATC | |
| | ATTAACAATGTGAACTTCTGCAGAGA | |
| | GAGCGGGCTGCGGACCAGAACAGG | |
| | ATCCAATATTGACTGTGAAAAGCTGC | |
| | GGAGAAGGTTCTCTAGTCTGCACTT | |
| | TATGGTCGAGGTGAAAGGCGATCTG | |
| | ACCGCTAAGAAAATGGTGCTGGCCC | |
| | TGCTGGAACTGGCTCGGCAGGACCA | |
| | TGGGGCACTGGATTGCTGCGTGGTC | |
| | GTGATCCTGAGTCACGGCTGCCAGG | |
| | CTTCACATCTGCAGTTCCCTGGGGC | |
| | AGTCTATGGAACTGACGGCTGTCCA | |
| | GTCAGCGTGGAGAAGATCGTGAACA | |
| | TCTTCAACGGCACCTCTTGCCCAAG | |
| | TCTGGGCGGGAAGCCCAAACTGTTC | |
| | TTTATTCAGGCCTGTGGAGGCGAGC | |
| | AGAAAGATCACGGCTTCGAAGTGGC | |
| | TAGCACCTCCCCCGAGGACGAATCA | |
| | CCTGGAAGCAACCCTGAGCCAGATG | |
| | CAACCCCCTTCCAGGAAGGCCTGAG | |
| | GACATTTGACCAGCTGGATGCCATC | |
| | TCAAGCCTGCCCACACCTTCTGACA | |
| | TTTTCGTCTCTTACAGTACTTTCCCT | |
| | GGATTTGTGAGCTGGCGCGATCCAA | |
| | AGTCAGGCAGCTGGTACGTGGAGAC | |
| | ACTGGACGATATCTTTGAGCAGTGG | |
| | GCCCATTCTGAAGACCTGCAGAGTC | |
| | TGCTGCTGCGAGTGGCCAATGCTGT | |
| | CTCTGTGAAGGGGATCTACAAACAG | |
| | ATGCCAGGATGCTTCAACTTTCTGA | |
| | GAAAGAAACTGTTCTTTAAGACCTCC | |
| | GCATCTAGGGCC-(T2A)- | |
| | CCGCGGGAAGGCCGAGGGAGCCTG | |
| | CTGACATGTGGCGATGTGGAGGAAA | |
| | ACCCAGGACCA | |
| Fv-iCASP9 S144A-T2A | SEQ ID NO: 48 | SEQ ID NO: 49 |
| | (Fv-L)- | (Fv-L)- |
| | GTCGACGGATTTGGTGATGTCGGTG | VDGFGDVGALEaLRGNADLAYILSM |
| | CTCTTGAGgcTTTGAGGGGAAATGCA | EPCGHCLIINNVNFCRESGLRTRTG |
| | GATTTGGCTTACATCCTGAGCATGG | SNIDCEKLRRRFSSLHFMVEVKGDL |
| | AGCCCTGTGGCCACTGCCTCATTAT | TAKKMVLALLELARQDHGALDCCV |
| | CAACAATGTGAACTTCTGCCGTGAG | VVILSHGCQASHLQFPGAVYGTDG |
| | TCCGGGCTCCGCACCCGCACTGGC | CPVSVEKIVNIFNGTSCPSLGGKPK |
| | TCCAACATCGACTGTGAGAAGTTGC | LFFIQACGGEQKDHGFEVASTSPE |
| | GGCGTCGCTTCTCCTCGCTGCATTT | DESPGSNPEPDATPFQEGLRTFDQ |
| | CATGGTGGAGGTGAAGGGCGACCT | LDAISSLPTPSDIFVSYSTFPGFVSW |
| | GACTGCCAAGAAAATGGTGCTGGCT | RDPKSGSVVYVETLDDIFEQWAHSE |
| | TTGCTGGAGCTGGCGCGGCAGGAC | DLQSLLLRVANAVSVKGIYKQMPGC |
| | CACGGTGCTCTGGACTGCTGCGTGG | FNFLRKKLFFKTSASRA |
| | TGGTCATTCTCTCTCACGGCTGTCA | |
| | GGCCAGCCACCTGCAGTTCCCAGG | |
| | GGCTGTCTACGGCACAGATGGATGC | |
| | CCTGTGTCGGTCGAGAAGATTGTGA | |
| | ACATCTTCAATGGGACCAGCTGCCC | |
| | CAGCCTGGGAGGGAAGCCCAAGCT | |
| | CTTTTTCATCCAGGCCTGTGGTGGG | |
| | GAGCAGAAAGACCATGGGTTTGAGG | |
| | TGGCCTCCACTTCCCCTGAAGACGA | |
| | GTCCCCTGGCAGTAACCCCGAGCCA | |
| | GATGCCACCCCGTTCCAGGAAGGTT | |
| | TGAGGACCTTCGACCAGCTGGACGC | |
| | CATATCTAGTTTGCCCACACCCAGT | |
| | GACATCTTTGTGTCCTACTCTACTTT | |
| | CCCAGGTTTTGTTTCCTGGAGGGAC | |
| | CCCAAGAGTGGCTCCTGGTACGTTG | |
| | AGACCCTGGACGACATCTTTGAGCA | |
| | GTGGGCTCACTCTGAAGACCTGCAG | |
| | TCCCTCCTGCTTAGGGTCGCTAATG | |
| | CTGTTTCGGTGAAAGGGATTTATAAA | |
| | CAGATGCCTGGTTGCTTTAATTTCCT | |
| | CCGGAAAAAACTTTTCTTTAAAACAT | |
| | CAGCTAGCAGAGCC-(T2A) | |
| Fv-iCASP9 S144D-T2A | SEQ ID NO: 50 | SEQ ID NO: 51 |
| | (Fv-L)- | (Fv-L)- |
| | GTCGACGGATTTGGTGATGTCGGTG | VDGFGDVGALEdLRGNADLAYILSM |
| | CTCTTGAGgacTTGAGGGGAAATGCA | EPCGHCLIINNVNFCRESGLRTRTG |
| | GATTTGGCTTACATCCTGAGCATGG | SNIDCEKLRRRFSSLHFMVEVKGDL |
| | AGCCCTGTGGCCACTGCCTCATTAT | TAKKMVLALLELARQDHGALDCCV |
| | CAACAATGTGAACTTCTGCCGTGAG | VVILSHGCQASHLQFPGAVYGTDG |
| | TCCGGGCTCCGCACCCGCACTGGC | CPVSVEKIVNIFNGTSCPSLGGKPK |
| | TCCAACATCGACTGTGAGAAGTTGC | LFFIQACGGEQKDHGFEVASTSPE |
| | GGCGTCGCTTCTCCTCGCTGCATTT | DESPGSNPEPDATPFQEGLRTFDQ |
| | CATGGTGGAGGTGAAGGGCGACCT | LDAISSLPTPSDIFVSYSTFPGFVSW |
| | GACTGCCAAGAAAATGGTGCTGGCT | RDPKSGSVVYVETLDDIFEQWAHSE |
| | TTGCTGGAGCTGGCGCGGCAGGAC | DLQSLLLRVANAVSVKGIYKQMPGC |
| | CACGGTGCTCTGGACTGCTGCGTGG | FNFLRKKLFFKTSASRA |
| | TGGTCATTCTCTCTCACGGCTGTCA | |
| | GGCCAGCCACCTGCAGTTCCCAGG | |
| | GGCTGTCTACGGCACAGATGGATGC | |
| | CCTGTGTCGGTCGAGAAGATTGTGA | |
| | ACATCTTCAATGGGACCAGCTGCCC | |
| | CAGCCTGGGAGGGAAGCCCAAGCT | |
| | CTTTTTCATCCAGGCCTGTGGTGGG | |
| | GAGCAGAAAGACCATGGGTTTGAGG | |
| | TGGCCTCCACTTCCCCTGAAGACGA | |
| | GTCCCCTGGCAGTAACCCCGAGCCA | |
| | GATGCCACCCCGTTCCAGGAAGGTT | |
| | TGAGGACCTTCGACCAGCTGGACGC | |
| | CATATCTAGTTTGCCCACACCCAGT | |
| | GACATCTTTGTGTCCTACTCTACTTT | |
| | CCCAGGTTTTGTTTCCTGGAGGGAC | |
| | CCCAAGAGTGGCTCCTGGTACGTTG | |
| | AGACCCTGGACGACATCTTTGAGCA | |
| | GTGGGCTCACTCTGAAGACCTGCAG | |
| | TCCCTCCTGCTTAGGGTCGCTAATG | |
| | CTGTTTCGGTGAAAGGGATTTATAAA | |
| | CAGATGCCTGGTTGCTTTAATTTCCT | |
| | CCGGAAAAAACTTTTCTTTAAAACAT | |
| | CAGCTAGCAGAGCC-(T2A) | |
| Fv-iCASP9 S183A-T2A | SEQ ID NO: 52 | SEQ ID NO: 53 |
| | (Fv-L)- | (Fv-L)- |
| | GTCGACGGATTTGGTGATGTCGGTG | VDGFGDVGALESLRGNADLAYILSM |
| | CTCTTGAGAGTTTGAGGGGAAATGC | EPCGHCLIINNVNFCRESGLRTRTG |
| | AGATTTGGCTTACATCCTGAGCATG | aNIDCEKLRRRFSSLHFMVEVKGDL |
| | GAGCCCTGTGGCCACTGCCTCATTA | TAKKMVLALLELARQDHGALDCCV |
| | TCAACAATGTGAACTTCTGCCGTGA | VVILSHGCQASHLQFPGAVYGTDG |
| | GTCCGGGCTCCGCACCCGCACTGG | CPVSVEKIVNIFNGTSCPSLGGKPK |
| | CgCCAACATCGACTGTGAGAAGTTG | LFFIQACGGEQKDHGFEVASTSPE |
| | CGGCGTCGCTTCTCCTCGCTGCATT | DESPGSNPEPDATPFQEGLRTFDQ |
| | TCATGGTGGAGGTGAAGGGCGACCT | LDAISSLPTPSDIFVSYSTFPGFVSW |
| | GACTGCCAAGAAAATGGTGCTGGCT | RDPKSGSVVYVETLDDIFEQWAHSE |
| | TTGCTGGAGCTGGCGCGGCAGGAC | DLQSLLLRVANAVSVKGIYKQMPGC |
| | CACGGTGCTCTGGACTGCTGCGTGG | FNFLRKKLFFKTSASRA-(T2A) |
| | TGGTCATTCTCTCTCACGGCTGTCA | |
| | GGCCAGCCACCTGCAGTTCCCAGG | |
| | GGCTGTCTACGGCACAGATGGATGC | |
| | CCTGTGTCGGTCGAGAAGATTGTGA | |
| | ACATCTTCAATGGGACCAGCTGCCC | |
| | CAGCCTGGGAGGGAAGCCCAAGCT | |
| | CTTTTTCATCCAGGCCTGTGGTGGG | |
| | GAGCAGAAAGACCATGGGTTTGAGG | |
| | TGGCCTCCACTTCCCCTGAAGACGA | |
| | GTCCCCTGGCAGTAACCCCGAGCCA | |
| | GATGCCACCCCGTTCCAGGAAGGTT | |
| | TGAGGACCTTCGACCAGCTGGACGC | |
| | CATATCTAGTTTGCCCACACCCAGT | |
| | GACATCTTTGTGTCCTACTCTACTTT | |
| | CCCAGGTTTTGTTTCCTGGAGGGAC | |
| | CCCAAGAGTGGCTCCTGGTACGTTG | |
| | AGACCCTGGACGACATCTTTGAGCA | |
| | GTGGGCTCACTCTGAAGACCTGCAG | |
| | TCCCTCCTGCTTAGGGTCGCTAATG | |
| | CTGTTTCGGTGAAAGGGATTTATAAA | |
| | CAGATGCCTGGTTGCTTTAATTTCCT | |
| | CCGGAAAAAACTTTTCTTTAAAACAT | |
| | CAGCTAGCAGAGCC-(T2A) | |
| Fv-iCASP9 S196A-T2A | SEQ ID NO: 54 | SEQ ID NO: 55 |
| | (Fv-L)- | (Fv-L)- |
| | GTCGACGGATTTGGTGATGTCGGTG | VDGFGDVGALESLRGNADLAYILSM |
| | CTCTTGAGAGTTTGAGGGGAAATGC | EPCGHCLIINNVNFCRESGLRTRTG |
| | AGATTTGGCTTACATCCTGAGCATG | SNIDCEKLRRRFSaLHFMVEVKGDL |
| | GAGCCCTGTGGCCACTGCCTCATTA | TAKKMVLALLELARQDHGALDCCV |
| | TCAACAATGTGAACTTCTGCCGTGA | VVILSHGCQASHLQFPGAVYGTDG |
| | GTCCGGGCTCCGCACCCGCACTGG | CPVSVEKIVNIFNGTSCPSLGGKPK |
| | CTCCAACATCGACTGTGAGAAGTTG | LFFIQACGGEQKDHGFEVASTSPE |
| | CGGCGTCGCTTCTCCgCGCTGCATT | DESPGSNPEPDATPFQEGLRTFDQ |
| | TCATGGTGGAGGTGAAGGGCGACCT | LDAISSLPTPSDIFVSYSTFPGFVSW |
| | GACTGCCAAGAAAATGGTGCTGGCT | RDPKSGSVVYVETLDDIFEQWAHSE |
| | TTGCTGGAGCTGGCGCGGCAGGAC | DLQSLLLRVANAVSVKGIYKQMPGC |
| | CACGGTGCTCTGGACTGCTGCGTGG | FNFLRKKLFFKTSASRA-(T2A) |
| | TGGTCATTCTCTCTCACGGCTGTCA | |
| | GGCCAGCCACCTGCAGTTCCCAGG | |
| | GGCTGTCTACGGCACAGATGGATGC | |
| | CCTGTGTCGGTCGAGAAGATTGTGA | |
| | ACATCTTCAATGGGACCAGCTGCCC | |
| | CAGCCTGGGAGGGAAGCCCAAGCT | |
| | CTTTTTCATCCAGGCCTGTGGTGGG | |
| | GAGCAGAAAGACCATGGGTTTGAGG | |
| | TGGCCTCCACTTCCCCTGAAGACGA | |
| | GTCCCCTGGCAGTAACCCCGAGCCA | |
| | GATGCCACCCCGTTCCAGGAAGGTT | |
| | TGAGGACCTTCGACCAGCTGGACGC | |
| | CATATCTAGTTTGCCCACACCCAGT | |
| | GACATCTTTGTGTCCTACTCTACTTT | |
| | CCCAGGTTTTGTTTCCTGGAGGGAC | |
| | CCCAAGAGTGGCTCCTGGTACGTTG | |
| | AGACCCTGGACGACATCTTTGAGCA | |
| | GTGGGCTCACTCTGAAGACCTGCAG | |
| | TCCCTCCTGCTTAGGGTCGCTAATG | |
| | CTGTTTCGGTGAAAGGGATTTATAAA | |
| | CAGATGCCTGGTTGCTTTAATTTCCT | |
| | CCGGAAAAAACTTTTCTTTAAAACAT | |
| | CAGCTAGCAGAGCC-(T2A) | |
| Fv-iCASP9 S196D-T2A | SEQ ID NO: 56 | SEQ ID NO: 57 |
| | (Fv-L)- | (Fv-L)- |
| | GTCGACGGATTTGGTGATGTCGGTG | VDGFGDVGALESLRGNADLAYILSM |
| | CTCTTGAGAGTTTGAGGGGAAATGC | EPCGHCLIINNVNFCRESGLRTRTG |
| | AGATTTGGCTTACATCCTGAGCATG | SNIDCEKLRRRFSdLHFMVEVKGDL |
| | GAGCCCTGTGGCCACTGCCTCATTA | TAKKMVLALLELARQDHGALDCCV |
| | TCAACAATGTGAACTTCTGCCGTGA | VVILSHGCQASHLQFPGAVYGTDG |
| | GTCCGGGCTCCGCACCCGCACTGG | CPVSVEKIVNIFNGTSCPSLGGKPK |
| | CTCCAACATCGACTGTGAGAAGTTG | LFFIQACGGEQKDHGFEVASTSPE |
| | CGGCGTCGCTTCTCCgacCTGCATTT | DESPGSNPEPDATPFQEGLRTFDQ |
| | CATGGTGGAGGTGAAGGGCGACCT | LDAISSLPTPSDIFVSYSTFPGFVSW |
| | GACTGCCAAGAAAATGGTGCTGGCT | RDPKSGSVVYVETLDDIFEQWAHSE |
| | TTGCTGGAGCTGGCGCGGCAGGAC | DLQSLLLRVANAVSVKGIYKQMPGC |
| | CACGGTGCTCTGGACTGCTGCGTGG | FNFLRKKLFFKTSASRA-(T2A) |
| | TGGTCATTCTCTCTCACGGCTGTCA | |
| | GGCCAGCCACCTGCAGTTCCCAGG | |
| | GGCTGTCTACGGCACAGATGGATGC | |
| | CCTGTGTCGGTCGAGAAGATTGTGA | |
| | ACATCTTCAATGGGACCAGCTGCCC | |
| | CAGCCTGGGAGGGAAGCCCAAGCT | |
| | CTTTTTCATCCAGGCCTGTGGTGGG | |
| | GAGCAGAAAGACCATGGGTTTGAGG | |
| | TGGCCTCCACTTCCCCTGAAGACGA | |
| | GTCCCCTGGCAGTAACCCCGAGCCA | |
| | GATGCCACCCCGTTCCAGGAAGGTT | |
| | TGAGGACCTTCGACCAGCTGGACGC | |
| | CATATCTAGTTTGCCCACACCCAGT | |
| | GACATCTTTGTGTCCTACTCTACTTT | |
| | CCCAGGTTTTGTTTCCTGGAGGGAC | |
| | CCCAAGAGTGGCTCCTGGTACGTTG | |
| | AGACCCTGGACGACATCTTTGAGCA | |
| | GTGGGCTCACTCTGAAGACCTGCAG | |
| | TCCCTCCTGCTTAGGGTCGCTAATG | |
| | CTGTTTCGGTGAAAGGGATTTATAAA | |
| | CAGATGCCTGGTTGCTTTAATTTCCT | |
| | CCGGAAAAAACTTTTCTTTAAAACAT | |
| | CAGCTAGCAGAGCC-(T2A) | |
| Fv-iCASP9 C285A-T2A | SEQ ID NO: 58 | SEQ ID NO: 59 |
| | (Fv-L)- | (Fv-L)- |
| | GTCGACGGATTTGGTGATGTCGGTG | VDGFGDVGALESLRGNADLAYILSM |
| | CTCTTGAGAGTTTGAGGGGAAATGC | EPCGHCLIINNVNFCRESGLRTRTG |
| | AGATTTGGCTTACATCCTGAGCATG | SNIDCEKLRRRFSSLHFMVEVKGDL |
| | GAGCCCTGTGGCCACTGCCTCATTA | TAKKMVLALLELARQDHGALDCCV |
| | TCAACAATGTGAACTTCTGCCGTGA | VVILSHGCQASHLQFPGAVYGTDG |
| | GTCCGGGCTCCGCACCCGCACTGG | CPVSVEKIVNIFNGTSCPSLGGKPK |
| | CTCCAACATCGACTGTGAGAAGTTG | LFFIQAaGGEQKDHGFEVASTSPED |
| | CGGCGTCGCTTCTCCTCGCTGCATT | ESPGSNPEPDATPFQEGLRTFDQL |
| | TCATGGTGGAGGTGAAGGGCGACCT | DAISSLPTPSDIFVSYSTFPGFVSW |
| | GACTGCCAAGAAAATGGTGCTGGCT | RDPKSGSVVYVETLDDIFEQWAHSE |
| | TTGCTGGAGCTGGCGCGGCAGGAC | DLQSLLLRVANAVSVKGIYKQMPGC |
| | CACGGTGCTCTGGACTGCTGCGTGG | FNFLRKKLFFKTSASRA-(T2A) |
| | TGGTCATTCTCTCTCACGGCTGTCA | |
| | GGCCAGCCACCTGCAGTTCCCAGG | |
| | GGCTGTCTACGGCACAGATGGATGC | |
| | CCTGTGTCGGTCGAGAAGATTGTGA | |
| | ACATCTTCAATGGGACCAGCTGCCC | |
| | CAGCCTGGGAGGGAAGCCCAAGCT | |
| | CTTTTTCATCCAGGCCgcgGGTGGGG | |
| | AGCAGAAAGACCATGGGTTTGAGGT | |
| | GGCCTCCACTTCCCCTGAAGACGAG | |
| | TCCCCTGGCAGTAACCCCGAGCCAG | |
| | ATGCCACCCCGTTCCAGGAAGGTTT | |
| | GAGGACCTTCGACCAGCTGGACGC | |
| | CATATCTAGTTTGCCCACACCCAGT | |
| | GACATCTTTGTGTCCTACTCTACTTT | |
| | CCCAGGTTTTGTTTCCTGGAGGGAC | |
| | CCCAAGAGTGGCTCCTGGTACGTTG | |
| | AGACCCTGGACGACATCTTTGAGCA | |
| | GTGGGCTCACTCTGAAGACCTGCAG | |
| | TCCCTCCTGCTTAGGGTCGCTAATG | |
| | CTGTTTCGGTGAAAGGGATTTATAAA | |
| | CAGATGCCTGGTTGCTTTAATTTCCT | |
| | CCGGAAAAAACTTTTCTTTAAAACAT | |
| | CAGCTAGCAGAGCC-(T2A) | |
| Fv-iCASP9 A316G-T2A | SEQ ID NO: 60 | SEQ ID NO: 61 |
| | (Fv-L)- | (Fv-L)- |
| | GTCGACGGATTTGGTGATGTCGGTG | VDGFGDVGALESLRGNADLAYILSM |
| | CTCTTGAGAGTTTGAGGGGAAATGC | EPCGHCLIINNVNFCRESGLRTRTG |
| | AGATTTGGCTTACATCCTGAGCATG | SNIDCEKLRRRFSSLHFMVEVKGDL |
| | GAGCCCTGTGGCCACTGCCTCATTA | TAKKMVLALLELARQDHGALDCCV |
| | TCAACAATGTGAACTTCTGCCGTGA | VVILSHGCQASHLQFPGAVYGTDG |
| | GTCCGGGCTCCGCACCCGCACTGG | CPVSVEKIVNIFNGTSCPSLGGKPK |
| | CTCCAACATCGACTGTGAGAAGTTG | LFFIQACGGEQKDHGFEVASTSPE |
| | CGGCGTCGCTTCTCCTCGCTGCATT | DESPGSNPEPDgTPFQEGLRTFDQ |
| | TCATGGTGGAGGTGAAGGGCGACCT | LDAISSLPTPSDIFVSYSTFPGFVSW |
| | GACTGCCAAGAAAATGGTGCTGGCT | RDPKSGSVVYVETLDDIFEQWAHSE |
| | TTGCTGGAGCTGGCGCGGCAGGAC | DLQSLLLRVANAVSVKGIYKQMPGC |
| | CACGGTGCTCTGGACTGCTGCGTGG | FNFLRKKLFFKTSASRA-(T2A) |
| | TGGTCATTCTCTCTCACGGCTGTCA | |
| | GGCCAGCCACCTGCAGTTCCCAGG | |
| | GGCTGTCTACGGCACAGATGGATGC | |
| | CCTGTGTCGGTCGAGAAGATTGTGA | |
| | ACATCTTCAATGGGACCAGCTGCCC | |
| | CAGCCTGGGAGGGAAGCCCAAGCT | |
| | CTTTTTCATCCAGGCCTGTGGTGGG | |
| | GAGCAGAAAGACCATGGGTTTGAGG | |
| | TGGCCTCCACTTCCCCTGAAGACGA | |
| | GTCCCCTGGCAGTAACCCCGAGCCA | |
| | GATGgCACCCCGTTCCAGGAAGGTT | |
| | TGAGGACCTTCGACCAGCTGGACGC | |
| | CATATCTAGTTTGCCCACACCCAGT | |
| | GACATCTTTGTGTCCTACTCTACTTT | |
| | CCCAGGTTTTGTTTCCTGGAGGGAC | |
| | CCCAAGAGTGGCTCCTGGTACGTTG | |
| | AGACCCTGGACGACATCTTTGAGCA | |
| | GTGGGCTCACTCTGAAGACCTGCAG | |
| | TCCCTCCTGCTTAGGGTCGCTAATG | |
| | CTGTTTCGGTGAAAGGGATTTATAAA | |
| | CAGATGCCTGGTTGCTTTAATTTCCT | |
| | CCGGAAAAAACTTTTCTTTAAAACAT | |
| | CAGCTAGCAGAGCC-(T2A) | |
| Fv-iCASP9 T317A-T2A | SEQ ID NO: 62 | SEQ ID NO: 63 |
| | (Fv-L)- | (Fv-L)- |
| | GTCGACGGATTTGGTGATGTCGGTG | VDGFGDVGALESLRGNADLAYILSM |
| | CTCTTGAGAGTTTGAGGGGAAATGC | EPCGHCLIINNVNFCRESGLRTRTG |
| | AGATTTGGCTTACATCCTGAGCATG | SNIDCEKLRRRFSS |
| | GAGCCCTGTGGCCACTGCCTCATTA | LHFMVEVKGDLTAKKMVLALLELAR |
| | TCAACAATGTGAACTTCTGCCGTGA | QDHGALDCCVVVILSHGCQASHLQ |
| | GTCCGGGCTCCGCACCCGCACTGG | FPGAVYGTDGC |
| | CTCCAACATCGACTGTGAGAAGTTG | PVSVEKIVNIFNGTSCPSLGGKPKLF |
| | CGGCGTCGCTTCTCCTCGCTGCATT | FIQACGGEQKDHGFEVASTSPEDE |
| | TCATGGTGGAGGTGAAGGGCGACCT | SPGSNPEPDA |
| | GACTGCCAAGAAAATGGTGCTGGCT | aPFQEGLRTFDQLDAISSLPTPSDIF |
| | TTGCTGGAGCTGGCGCGGCAGGAC | VSYSTFPGFVSWRDPKSGSVVYVET |
| | CACGGTGCTCTGGACTGCTGCGTGG | LDDIFEQWAH |
| | TGGTCATTCTCTCTCACGGCTGTCA | SEDLQSLLLRVANAVSVKGIYKQMP |
| | GGCCAGCCACCTGCAGTTCCCAGG | GCFNFLRKKLFFKTSASRA- |
| | GGCTGTCTACGGCACAGATGGATGC | (T2A) |
| | CCTGTGTCGGTCGAGAAGATTGTGA | |
| | ACATCTTCAATGGGACCAGCTGCCC | |
| | CAGCCTGGGAGGGAAGCCCAAGCT | |
| | CTTTTTCATCCAGGCCTGTGGTGGG | |
| | GAGCAGAAAGACCATGGGTTTGAGG | |
| | TGGCCTCCACTTCCCCTGAAGACGA | |
| | GTCCCCTGGCAGTAACCCCGAGCCA | |
| | GATGCCgCCCCGTTCCAGGAAGGTT | |
| | TGAGGACCTTCGACCAGCTGGACGC | |
| | CATATCTAGTTTGCCCACACCCAGT | |
| | GACATCTTTGTGTCCTACTCTACTTT | |
| | CCCAGGTTTTGTTTCCTGGAGGGAC | |
| | CCCAAGAGTGGCTCCTGGTACGTTG | |
| | AGACCCTGGACGACATCTTTGAGCA | |
| | GTGGGCTCACTCTGAAGACCTGCAG | |
| | TCCCTCCTGCTTAGGGTCGCTAATG | |
| | CTGTTTCGGTGAAAGGGATTTATAAA | |
| | CAGATGCCTGGTTGCTTTAATTTCCT | |
| | CCGGAAAAAACTTTTCTTTAAAACAT | |
| | CAGCTAGCAGAGCC-(T2A) | |
| Fv-iCASP9 T317C-T2A | SEQ ID NO: 64 | SEQ ID NO: 65 |
| | (Fv-L)- | (Fv-L)- |
| | GTCGACGGATTTGGTGATGTCGGTG | VDGFGDVGALESLRGNADLAYILSM |
| | CTCTTGAGAGTTTGAGGGGAAATGC | EPCGHCLIINNVNFCRESGLRTRTG |
| | AGATTTGGCTTACATCCTGAGCATG | SNIDCEKLRRRFSS |
| | GAGCCCTGTGGCCACTGCCTCATTA | LHFMVEVKGDLTAKKMVLALLELAR |
| | TCAACAATGTGAACTTCTGCCGTGA | QDHGALDCCVVVILSHGCQASHLQ |
| | GTCCGGGCTCCGCACCCGCACTGG | FPGAVYGTDGC |
| | CTCCAACATCGACTGTGAGAAGTTG | PVSVEKIVNIFNGTSCPSLGGKPKLF |
| | CGGCGTCGCTTCTCCTCGCTGCATT | FIQACGGEQKDHGFEVASTSPEDE |
| | TCATGGTGGAGGTGAAGGGCGACCT | SPGSNPEPDA |
| | GACTGCCAAGAAAATGGTGCTGGCT | cPFQEGLRTFDQLDAISSLPTPSDIF |
| | TTGCTGGAGCTGGCGCGGCAGGAC | VSYSTFPGFVSWRDPKSGSVVYVET |
| | CACGGTGCTCTGGACTGCTGCGTGG | LDDIFEQWAH |
| | TGGTCATTCTCTCTCACGGCTGTCA | SEDLQSLLLRVANAVSVKGIYKQMP |
| | GGCCAGCCACCTGCAGTTCCCAGG | GCFNFLRKKLFFKTSASRA- |
| | GGCTGTCTACGGCACAGATGGATGC | (T2A) |
| | CCTGTGTCGGTCGAGAAGATTGTGA | |
| | ACATCTTCAATGGGACCAGCTGCCC | |
| | CAGCCTGGGAGGGAAGCCCAAGCT | |
| | CTTTTTCATCCAGGCCTGTGGTGGG | |
| | GAGCAGAAAGACCATGGGTTTGAGG | |
| | TGGCCTCCACTTCCCCTGAAGACGA | |
| | GTCCCCTGGCAGTAACCCCGAGCCA | |
| | GATGCCtgCCCGTTCCAGGAAGGTTT | |
| | GAGGACCTTCGACCAGCTGGACGC | |
| | CATATCTAGTTTGCCCACACCCAGT | |
| | GACATCTTTGTGTCCTACTCTACTTT | |
| | CCCAGGTTTTGTTTCCTGGAGGGAC | |
| | CCCAAGAGTGGCTCCTGGTACGTTG | |
| | AGACCCTGGACGACATCTTTGAGCA | |
| | GTGGGCTCACTCTGAAGACCTGCAG | |
| | TCCCTCCTGCTTAGGGTCGCTAATG | |
| | CTGTTTCGGTGAAAGGGATTTATAAA | |
| | CAGATGCCTGGTTGCTTTAATTTCCT | |
| | CCGGAAAAAACTTTTCTTTAAAACAT | |
| | CAGCTAGCAGAGCC-(T2A) | |
| Fv-iCASP9 T317S-T2A | SEQ ID NO: 66 | SEQ ID NO: 67 |
| | (Fv-L)- | (Fv-L)- |
| | GTCGACGGATTTGGTGATGTCGGTG | VDGFGDVGALESLRGNADLAYILSM |
| | CTCTTGAGAGTTTGAGGGGAAATGC | EPCGHCLIINNVNFCRESGLRTRTG |
| | AGATTTGGCTTACATCCTGAGCATG | SNIDCEKLRRRFSS |
| | GAGCCCTGTGGCCACTGCCTCATTA | LHFMVEVKGDLTAKKMVLALLELAR |
| | TCAACAATGTGAACTTCTGCCGTGA | QDHGALDCCVVVILSHGCQASHLQ |
| | GTCCGGGCTCCGCACCCGCACTGG | FPGAVYGTDGC |
| | CTCCAACATCGACTGTGAGAAGTTG | PVSVEKIVNIFNGTSCPSLGGKPKLF |
| | CGGCGTCGCTTCTCCTCGCTGCATT | FIQACGGEQKDHGFEVASTSPEDE |
| | TCATGGTGGAGGTGAAGGGCGACCT | SPGSNPEPDA |
| | GACTGCCAAGAAAATGGTGCTGGCT | sPFQEGLRTFDQLDAISSLPTPSDIF |
| | TTGCTGGAGCTGGCGCGGCAGGAC | VSYSTFPGFVSWRDPKSGSVVYVET |
| | CACGGTGCTCTGGACTGCTGCGTGG | LDDIFEQWAH |
| | TGGTCATTCTCTCTCACGGCTGTCA | SEDLQSLLLRVANAVSVKGIYKQMP |
| | GGCCAGCCACCTGCAGTTCCCAGG | GCFNFLRKKLFFKTSASRA- |
| | GGCTGTCTACGGCACAGATGGATGC | (T2A) |
| | CCTGTGTCGGTCGAGAAGATTGTGA | |
| | ACATCTTCAATGGGACCAGCTGCCC | |
| | CAGCCTGGGAGGGAAGCCCAAGCT | |
| | CTTTTTCATCCAGGCCTGTGGTGGG | |
| | GAGCAGAAAGACCATGGGTTTGAGG | |
| | TGGCCTCCACTTCCCCTGAAGACGA | |
| | GTCCCCTGGCAGTAACCCCGAGCCA | |
| | GATGCCtCCCCGTTCCAGGAAGGTTT | |
| | GAGGACCTTCGACCAGCTGGACGC | |
| | CATATCTAGTTTGCCCACACCCAGT | |
| | GACATCTTTGTGTCCTACTCTACTTT | |
| | CCCAGGTTTTGTTTCCTGGAGGGAC | |
| | CCCAAGAGTGGCTCCTGGTACGTTG | |
| | AGACCCTGGACGACATCTTTGAGCA | |
| | GTGGGCTCACTCTGAAGACCTGCAG | |
| | TCCCTCCTGCTTAGGGTCGCTAATG | |
| | CTGTTTCGGTGAAAGGGATTTATAAA | |
| | CAGATGCCTGGTTGCTTTAATTTCCT | |
| | CCGGAAAAAACTTTTCTTTAAAACAT | |
| | CAGCTAGCAGAGCC-(T2A) | |
| Fv-iCASP9 F326K-T2A | SEQ ID NO: 68 | SEQ ID NO: 69 |
| | (Fv-L)- | (Fv-L)- |
| | GTCGACGGATTTGGTGATGTCGGTG | VDGFGDVGALESLRGNADLAYILSM |
| | CTCTTGAGAGTTTGAGGGGAAATGC | EPCGHCLIINNVNFCRESGLRTRTG |
| | AGATTTGGCTTACATCCTGAGCATG | SNIDCEKLRRRFSSLHFMVEVKGDL |
| | GAGCCCTGTGGCCACTGCCTCATTA | TAKKMVLALLELARQDHGALDCCV |
| | TCAACAATGTGAACTTCTGCCGTGA | VVILSHGCQASHLQFPGAVYGTDG |
| | GTCCGGGCTCCGCACCCGCACTGG | CPVSVEKIVNIFNGTSCPSLGGKPK |
| | CTCCAACATCGACTGTGAGAAGTTG | LFFIQACGGEQKDHGFEVASTSPE |
| | CGGCGTCGCTTCTCCTCGCTGCATT | DESPGSNPEPDATPFQEGLRTkDQ |
| | TCATGGTGGAGGTGAAGGGCGACCT | LDAISSLPTPSDIFVSYSTFPGFVSW |
| | GACTGCCAAGAAAATGGTGCTGGCT | RDPKSGSVVYVETLDDIFEQWAHSE |
| | TTGCTGGAGCTGGCGCGGCAGGAC | DLQSLLLRVANAVSVKGIYKQMPGC |
| | CACGGTGCTCTGGACTGCTGCGTGG | FNFLRKKLFFKTSASRA |
| | TGGTCATTCTCTCTCACGGCTGTCA | |
| | GGCCAGCCACCTGCAGTTCCCAGG | |
| | GGCTGTCTACGGCACAGATGGATGC | |
| | CCTGTGTCGGTCGAGAAGATTGTGA | |
| | ACATCTTCAATGGGACCAGCTGCCC | |
| | CAGCCTGGGAGGGAAGCCCAAGCT | |
| | CTTTTTCATCCAGGCCTGTGGTGGG | |
| | GAGCAGAAAGACCATGGGTTTGAGG | |
| | TGGCCTCCACTTCCCCTGAAGACGA | |
| | GTCCCCTGGCAGTAACCCCGAGCCA | |
| | GATGCCACCCCGTTCCAGGAAGGTT | |
| | TGAGGACCaagGACCAGCTGGACGC | |
| | CATATCTAGTTTGCCCACACCCAGT | |
| | GACATCTTTGTGTCCTACTCTACTTT | |
| | CCCAGGTTTTGTTTCCTGGAGGGAC | |
| | CCCAAGAGTGGCTCCTGGTACGTTG | |
| | AGACCCTGGACGACATCTTTGAGCA | |
| | GTGGGCTCACTCTGAAGACCTGCAG | |
| | TCCCTCCTGCTTAGGGTCGCTAATG | |
| | CTGTTTCGGTGAAAGGGATTTATAAA | |
| | CAGATGCCTGGTTGCTTTAATTTCCT | |
| | CCGGAAAAAACTTTTCTTTAAAACAT | |
| | CAGCTAGCAGAGCC | |
| Fv-iCASP9 D327K-T2A | SEQ ID NO: 70 | SEQ ID NO: 71 |
| | (Fv-L)- | (Fv-L)- |
| | GTCGACGGATTTGGTGATGTCGGTG | VDGFGDVGALESLRGNADLAYILSM |
| | CTCTTGAGAGTTTGAGGGGAAATGC | EPCGHCLIINNVNFCRESGLRTRTG |
| | AGATTTGGCTTACATCCTGAGCATG | SNIDCEKLRRRFSSLHFMVEVKGDL |
| | GAGCCCTGTGGCCACTGCCTCATTA | TAKKMVLALLELARQDHGALDCCV |
| | TCAACAATGTGAACTTCTGCCGTGA | VVILSHGCQASHLQFPGAVYGTDG |
| | GTCCGGGCTCCGCACCCGCACTGG | CPVSVEKIVNIFNGTSCPSLGGKPK |
| | CTCCAACATCGACTGTGAGAAGTTG | LFFIQACGGEQKDHGFEVASTSPE |
| | CGGCGTCGCTTCTCCTCGCTGCATT | DESPGSNPEPDATPFQEGLRTFkQ |
| | TCATGGTGGAGGTGAAGGGCGACCT | LDAISSLPTPSDIFVSYSTFPGFVSW |
| | GACTGCCAAGAAAATGGTGCTGGCT | RDPKSGSVVYVETLDDIFEQWAHSE |
| | TTGCTGGAGCTGGCGCGGCAGGAC | DLQSLLLRVANAVSVKGIYKQMPGC |
| | CACGGTGCTCTGGACTGCTGCGTGG | FNFLRKKLFFKTSASRA-(T2A) |
| | TGGTCATTCTCTCTCACGGCTGTCA | |
| | GGCCAGCCACCTGCAGTTCCCAGG | |
| | GGCTGTCTACGGCACAGATGGATGC | |
| | CCTGTGTCGGTCGAGAAGATTGTGA | |
| | ACATCTTCAATGGGACCAGCTGCCC | |
| | CAGCCTGGGAGGGAAGCCCAAGCT | |
| | CTTTTTCATCCAGGCCTGTGGTGGG | |
| | GAGCAGAAAGACCATGGGTTTGAGG | |
| | TGGCCTCCACTTCCCCTGAAGACGA | |
| | GTCCCCTGGCAGTAACCCCGAGCCA | |
| | GATGCCACCCCGTTCCAGGAAGGTT | |
| | TGAGGACCTTCaAgCAGCTGGACGC | |
| | CATATCTAGTTTGCCCACACCCAGT | |
| | GACATCTTTGTGTCCTACTCTACTTT | |
| | CCCAGGTTTTGTTTCCTGGAGGGAC | |
| | CCCAAGAGTGGCTCCTGGTACGTTG | |
| | AGACCCTGGACGACATCTTTGAGCA | |
| | GTGGGCTCACTCTGAAGACCTGCAG | |
| | TCCCTCCTGCTTAGGGTCGCTAATG | |
| | CTGTTTCGGTGAAAGGGATTTATAAA | |
| | CAGATGCCTGGTTGCTTTAATTTCCT | |
| | CCGGAAAAAACTTTTCTTTAAAACAT | |
| | CAGCTAGCAGAGCC-(T2A) | |
| Fv-iCASP9 D327R-T2A | SEQ ID NO: 72 | SEQ ID NO: 73 |
| | GTCGACGGATTTGGTGATGTCGGTG | (Fv-L)- |
| | CTCTTGAGAGTTTGAGGGGAAATGC | VDGFGDVGALESLRGNADLAYILSM |
| | AGATTTGGCTTACATCCTGAGCATG | EPCGHCLIINNVNFCRESGLRTRTG |
| | GAGCCCTGTGGCCACTGCCTCATTA | SNIDCEKLRRRFSSLHFMVEVKGDL |
| | TCAACAATGTGAACTTCTGCCGTGA | TAKKMVLALLELARQDHGALDCCV |
| | GTCCGGGCTCCGCACCCGCACTGG | VVILSHGCQASHLQFPGAVYGTDG |
| | CTCCAACATCGACTGTGAGAAGTTG | CPVSVEKIVNIFNGTSCPSLGGKPK |
| | CGGCGTCGCTTCTCCTCGCTGCATT | LFFIQACGGEQKDHGFEVASTSPE |
| | TCATGGTGGAGGTGAAGGGCGACCT | DESPGSNPEPDATPFQEGLRTFrQL |
| | GACTGCCAAGAAAATGGTGCTGGCT | DAISSLPTPSDIFVSYSTFPGFVSW |
| | TTGCTGGAGCTGGCGCGGCAGGAC | RDPKSGSVVYVETLDDIFEQWAHSE |
| | CACGGTGCTCTGGACTGCTGCGTGG | DLQSLLLRVANAVSVKGIYKQMPGC |
| | TGGTCATTCTCTCTCACGGCTGTCA | FNFLRKKLFFKTSASRA-(T2A) |
| | GGCCAGCCACCTGCAGTTCCCAGG | |
| | GGCTGTCTACGGCACAGATGGATGC | |
| | CCTGTGTCGGTCGAGAAGATTGTGA | |
| | ACATCTTCAATGGGACCAGCTGCCC | |
| | CAGCCTGGGAGGGAAGCCCAAGCT | |
| | CTTTTTCATCCAGGCCTGTGGTGGG | |
| | GAGCAGAAAGACCATGGGTTTGAGG | |
| | TGGCCTCCACTTCCCCTGAAGACGA | |
| | GTCCCCTGGCAGTAACCCCGAGCCA | |
| | GATGCCACCCCGTTCCAGGAAGGTT | |
| | TGAGGACCTTCaggCAGCTGGACGC | |
| | CATATCTAGTTTGCCCACACCCAGT | |
| | GACATCTTTGTGTCCTACTCTACTTT | |
| | CCCAGGTTTTGTTTCCTGGAGGGAC | |
| | CCCAAGAGTGGCTCCTGGTACGTTG | |
| | AGACCCTGGACGACATCTTTGAGCA | |
| | GTGGGCTCACTCTGAAGACCTGCAG | |
| | TCCCTCCTGCTTAGGGTCGCTAATG | |
| | CTGTTTCGGTGAAAGGGATTTATAAA | |
| | CAGATGCCTGGTTGCTTTAATTTCCT | |
| | CCGGAAAAAACTTTTCTTTAAAACAT | |
| | CAGCTAGCAGAGCC-(T2A) | |
| Fv-iCASP9 D327G-T2A | SEQ ID NO: 74 | SEQ ID NO: 75 |
| | GTCGACGGATTTGGTGATGTCGGTG | (Fv-L)- |
| | CTCTTGAGAGTTTGAGGGGAAATGC | VDGFGDVGALESLRGNADLAYILSM |
| | AGATTTGGCTTACATCCTGAGCATG | EPCGHCLIINNVNFCRESGLRTRTG |
| | GAGCCCTGTGGCCACTGCCTCATTA | SNIDCEKLRRRFSSLHFMVEVKGDL |
| | TCAACAATGTGAACTTCTGCCGTGA | TAKKMVLALLELARQDHGALDCCV |
| | GTCCGGGCTCCGCACCCGCACTGG | VVILSHGCQASHLQFPGAVYGTDG |
| | CTCCAACATCGACTGTGAGAAGTTG | CPVSVEKIVNIFNGTSCPSLGGKPK |
| | CGGCGTCGCTTCTCCTCGCTGCATT | LFFIQACGGEQKDHGFEVASTSPE |
| | TCATGGTGGAGGTGAAGGGCGACCT | DESPGSNPEPDATPFQEGLRTFgQ |
| | GACTGCCAAGAAAATGGTGCTGGCT | LDAISSLPTPSDIFVSYSTFPGFVSW |
| | TTGCTGGAGCTGGCGCGGCAGGAC | RDPKSGSVVYVETLDDIFEQWAHSE |
| | CACGGTGCTCTGGACTGCTGCGTGG | DLQSLLLRVANAVSVKGIYKQMPGC |
| | TGGTCATTCTCTCTCACGGCTGTCA | FNFLRKKLFFKTSASRA-(T2A) |
| | GGCCAGCCACCTGCAGTTCCCAGG | |
| | GGCTGTCTACGGCACAGATGGATGC | |
| | CCTGTGTCGGTCGAGAAGATTGTGA | |
| | ACATCTTCAATGGGACCAGCTGCCC | |
| | CAGCCTGGGAGGGAAGCCCAAGCT | |
| | CTTTTTCATCCAGGCCTGTGGTGGG | |
| | GAGCAGAAAGACCATGGGTTTGAGG | |
| | TGGCCTCCACTTCCCCTGAAGACGA | |
| | GTCCCCTGGCAGTAACCCCGAGCCA | |
| | GATGCCACCCCGTTCCAGGAAGGTT | |
| | TGAGGACCTTCGgCCAGCTGGACGC | |
| | CATATCTAGTTTGCCCACACCCAGT | |
| | GACATCTTTGTGTCCTACTCTACTTT | |
| | CCCAGGTTTTGTTTCCTGGAGGGAC | |
| | CCCAAGAGTGGCTCCTGGTACGTTG | |
| | AGACCCTGGACGACATCTTTGAGCA | |
| | GTGGGCTCACTCTGAAGACCTGCAG | |
| | TCCCTCCTGCTTAGGGTCGCTAATG | |
| | CTGTTTCGGTGAAAGGGATTTATAAA | |
| | CAGATGCCTGGTTGCTTTAATTTCCT | |
| | CCGGAAAAAACTTTTCTTTAAAACAT | |
| | CAGCTAGCAGAGCC-(T2A) | |
| Fv-iCASP9 Q328K-T2A | SEQ ID NO: 76 | SEQ ID NO: 77 |
| | (Fv-L)- | VDGFGDVGALESLRGNADLAYILSM |
| | GTCGACGGATTTGGTGATGTCGGTG | EPCGHCLIINNVNFCRESGLRTRTG |
| | CTCTTGAGAGTTTGAGGGGAAATGC | SNIDCEKLRRRFSSLHFMVEVKGDL |
| | AGATTTGGCTTACATCCTGAGCATG | TAKKMVLALLELARQDHGALDCCV |
| | GAGCCCTGTGGCCACTGCCTCATTA | VVILSHGCQASHLQFPGAVYGTDG |
| | TCAACAATGTGAACTTCTGCCGTGA | CPVSVEKIVNIFNGTSCPSLGGKPK |
| | GTCCGGGCTCCGCACCCGCACTGG | LFFIQACGGEQKDHGFEVASTSPE |
| | CTCCAACATCGACTGTGAGAAGTTG | DESPGSNPEPDATPFQEGLRTFDkL |
| | CGGCGTCGCTTCTCCTCGCTGCATT | DAISSLPTPSDIFVSYSTFPGFVSW |
| | TCATGGTGGAGGTGAAGGGCGACCT | RDPKSGSVVYVETLDDIFEQWAHSE |
| | GACTGCCAAGAAAATGGTGCTGGCT | DLQSLLLRVANAVSVKGIYKQMPGC |
| | TTGCTGGAGCTGGCGCGGCAGGAC | FNFLRKKLFFKTSASRA-(T2A) |
| | CACGGTGCTCTGGACTGCTGCGTGG | |
| | TGGTCATTCTCTCTCACGGCTGTCA | |
| | GGCCAGCCACCTGCAGTTCCCAGG | |
| | GGCTGTCTACGGCACAGATGGATGC | |
| | CCTGTGTCGGTCGAGAAGATTGTGA | |
| | ACATCTTCAATGGGACCAGCTGCCC | |
| | CAGCCTGGGAGGGAAGCCCAAGCT | |
| | CTTTTTCATCCAGGCCTGTGGTGGG | |
| | GAGCAGAAAGACCATGGGTTTGAGG | |
| | TGGCCTCCACTTCCCCTGAAGACGA | |
| | GTCCCCTGGCAGTAACCCCGAGCCA | |
| | GATGCCACCCCGTTCCAGGAAGGTT | |
| | TGAGGACCTTCGACaAGCTGGACGC | |
| | CATATCTAGTTTGCCCACACCCAGT | |
| | GACATCTTTGTGTCCTACTCTACTTT | |
| | CCCAGGTTTTGTTTCCTGGAGGGAC | |
| | CCCAAGAGTGGCTCCTGGTACGTTG | |
| | AGACCCTGGACGACATCTTTGAGCA | |
| | GTGGGCTCACTCTGAAGACCTGCAG | |
| | TCCCTCCTGCTTAGGGTCGCTAATG | |
| | CTGTTTCGGTGAAAGGGATTTATAAA | |
| | CAGATGCCTGGTTGCTTTAATTTCCT | |
| | CCGGAAAAAACTTTTCTTTAAAACAT | |
| | CAGCTAGCAGAGCC-(T2A) | |
| Fv-iCASP9 0328R-T2A | SEQ ID NO: 78 | SEQ ID NO: 79 |
| | (Fv-L)- | (Fv-L)- |
| | GTCGACGGATTTGGTGATGTCGGTG | VDGFGDVGALESLRGNADLAYILSM |
| | CTCTTGAGAGTTTGAGGGGAAATGC | EPCGHCLIINNVNFCRESGLRTRTG |
| | AGATTTGGCTTACATCCTGAGCATG | SNIDCEKLRRRFSSLHFMVEVKGDL |
| | GAGCCCTGTGGCCACTGCCTCATTA | TAKKMVLALLELARQDHGALDCCV |
| | TCAACAATGTGAACTTCTGCCGTGA | VVILSHGCQASHLQFPGAVYGTDG |
| | GTCCGGGCTCCGCACCCGCACTGG | CPVSVEKIVNIFNGTSCPSLGGKPK |
| | CTCCAACATCGACTGTGAGAAGTTG | LFFIQACGGEQKDHGFEVASTSPE |
| | CGGCGTCGCTTCTCCTCGCTGCATT | DESPGSNPEPDATPFQEGLRTFDrL |
| | TCATGGTGGAGGTGAAGGGCGACCT | DAISSLPTPSDIFVSYSTFPGFVSW |
| | GACTGCCAAGAAAATGGTGCTGGCT | RDPKSGSVVYVETLDDIFEQWAHSE |
| | TTGCTGGAGCTGGCGCGGCAGGAC | DLQSLLLRVANAVSVKGIYKQMPGC |
| | CACGGTGCTCTGGACTGCTGCGTGG | FNFLRKKLFFKTSASRA-(T2A) |
| | TGGTCATTCTCTCTCACGGCTGTCA | |
| | GGCCAGCCACCTGCAGTTCCCAGG | |
| | GGCTGTCTACGGCACAGATGGATGC | |
| | CCTGTGTCGGTCGAGAAGATTGTGA | |
| | ACATCTTCAATGGGACCAGCTGCCC | |
| | CAGCCTGGGAGGGAAGCCCAAGCT | |
| | CTTTTTCATCCAGGCCTGTGGTGGG | |
| | GAGCAGAAAGACCATGGGTTTGAGG | |
| | TGGCCTCCACTTCCCCTGAAGACGA | |
| | GTCCCCTGGCAGTAACCCCGAGCCA | |
| | GATGCCACCCCGTTCCAGGAAGGTT | |
| | TGAGGACCTTCGACagGCTGGACGC | |
| | CATATCTAGTTTGCCCACACCCAGT | |
| | GACATCTTTGTGTCCTACTCTACTTT | |
| | CCCAGGTTTTGTTTCCTGGAGGGAC | |
| | CCCAAGAGTGGCTCCTGGTACGTTG | |
| | AGACCCTGGACGACATCTTTGAGCA | |
| | GTGGGCTCACTCTGAAGACCTGCAG | |
| | TCCCTCCTGCTTAGGGTCGCTAATG | |
| | CTGTTTCGGTGAAAGGGATTTATAAA | |
| | CAGATGCCTGGTTGCTTTAATTTCCT | |
| | CCGGAAAAAACTTTTCTTTAAAACAT | |
| | CAGCTAGCAGAGCC-(T2A) | |
| Fv-iCASP9 L329K-T2A | SEQ ID NO: 80 | SEQ ID NO: 81 |
| | (Fv-L)- | (Fv-L)- |
| | GTCGACGGATTTGGTGATGTCGGTG | VDGFGDVGALESLRGNADLAYILSM |
| | CTCTTGAGAGTTTGAGGGGAAATGC | EPCGHCLIINNVNFCRESGLRTRTG |
| | AGATTTGGCTTACATCCTGAGCATG | SNIDCEKLRRRFSSLHFMVEVKGDL |
| | GAGCCCTGTGGCCACTGCCTCATTA | TAKKMVLALLELARQDHGALDCCV |
| | TCAACAATGTGAACTTCTGCCGTGA | VVILSHGCQASHLQFPGAVYGTDG |
| | GTCCGGGCTCCGCACCCGCACTGG | CPVSVEKIVNIFNGTSCPSLGGKPK |
| | CTCCAACATCGACTGTGAGAAGTTG | LFFIQACGGEQKDHGFEVASTSPE |
| | CGGCGTCGCTTCTCCTCGCTGCATT | DESPGSNPEPDATPFQEGLRTFDQ |
| | TCATGGTGGAGGTGAAGGGCGACCT | kDAISSLPTPSDIFVSYSTFPGFVSW |
| | GACTGCCAAGAAAATGGTGCTGGCT | RDPKSGSVVYVETLDDIFEQWAHSE |
| | TTGCTGGAGCTGGCGCGGCAGGAC | DLQSLLLRVANAVSVKGIYKQMPGC |
| | CACGGTGCTCTGGACTGCTGCGTGG | FNFLRKKLFFKTSASRA |
| | TGGTCATTCTCTCTCACGGCTGTCA | |
| | GGCCAGCCACCTGCAGTTCCCAGG | |
| | GGCTGTCTACGGCACAGATGGATGC | |
| | CCTGTGTCGGTCGAGAAGATTGTGA | |
| | ACATCTTCAATGGGACCAGCTGCCC | |
| | CAGCCTGGGAGGGAAGCCCAAGCT | |
| | CTTTTTCATCCAGGCCTGTGGTGGG | |
| | GAGCAGAAAGACCATGGGTTTGAGG | |
| | TGGCCTCCACTTCCCCTGAAGACGA | |
| | GTCCCCTGGCAGTAACCCCGAGCCA | |
| | GATGCCACCCCGTTCCAGGAAGGTT | |
| | TGAGGACCTTCGACCAGaaGGACGC | |
| | CATATCTAGTTTGCCCACACCCAGT | |
| | GACATCTTTGTGTCCTACTCTACTTT | |
| | CCCAGGTTTTGTTTCCTGGAGGGAC | |
| | CCCAAGAGTGGCTCCTGGTACGTTG | |
| | AGACCCTGGACGACATCTTTGAGCA | |
| | GTGGGCTCACTCTGAAGACCTGCAG | |
| | TCCCTCCTGCTTAGGGTCGCTAATG | |
| | CTGTTTCGGTGAAAGGGATTTATAAA | |
| | CAGATGCCTGGTTGCTTTAATTTCCT | |
| | CCGGAAAAAACTTTTCTTTAAAACAT | |
| | CAGCTAGCAGAGCC | |
| Fv-iCASP9 L329E-T2A | SEQ ID NO: 82 | SEQ ID NO: 83 |
| | (Fv-L)- | (Fv-L)- |
| | GTCGACGGATTTGGTGATGTCGGTG | VDGFGDVGALESLRGNADLAYILSM |
| | CTCTTGAGAGTTTGAGGGGAAATGC | EPCGHCLIINNVNFCRESGLRTRTG |
| | AGATTTGGCTTACATCCTGAGCATG | SNIDCEKLRRRFSSLHFMVEVKGDL |
| | GAGCCCTGTGGCCACTGCCTCATTA | TAKKMVLALLELARQDHGALDCCV |
| | TCAACAATGTGAACTTCTGCCGTGA | VVILSHGCQASHLQFPGAVYGTDG |
| | GTCCGGGCTCCGCACCCGCACTGG | CPVSVEKIVNIFNGTSCPSLGGKPK |
| | CTCCAACATCGACTGTGAGAAGTTG | LFFIQACGGEQKDHGFEVASTSPE |
| | CGGCGTCGCTTCTCCTCGCTGCATT | DESPGSNPEPDATPFQEGLRTFDQ |
| | TCATGGTGGAGGTGAAGGGCGACCT | eDAISSLPTPSDIFVSYSTFPGFVSW |
| | GACTGCCAAGAAAATGGTGCTGGCT | RDPKSGSVVYVETLDDIFEQWAHSE |
| | TTGCTGGAGCTGGCGCGGCAGGAC | DLQSLLLRVANAVSVKGIYKQMPGC |
| | CACGGTGCTCTGGACTGCTGCGTGG | FNFLRKKLFFKTSASRA-(T2A) |
| | TGGTCATTCTCTCTCACGGCTGTCA | |
| | GGCCAGCCACCTGCAGTTCCCAGG | |
| | GGCTGTCTACGGCACAGATGGATGC | |
| | CCTGTGTCGGTCGAGAAGATTGTGA | |
| | ACATCTTCAATGGGACCAGCTGCCC | |
| | CAGCCTGGGAGGGAAGCCCAAGCT | |
| | CTTTTTCATCCAGGCCTGTGGTGGG | |
| | GAGCAGAAAGACCATGGGTTTGAGG | |
| | TGGCCTCCACTTCCCCTGAAGACGA | |
| | GTCCCCTGGCAGTAACCCCGAGCCA | |
| | GATGCCACCCCGTTCCAGGAAGGTT | |
| | TGAGGACCTTCGACCAGgaGGACGC | |
| | CATATCTAGTTTGCCCACACCCAGT | |
| | GACATCTTTGTGTCCTACTCTACTTT | |
| | CCCAGGTTTTGTTTCCTGGAGGGAC | |
| | CCCAAGAGTGGCTCCTGGTACGTTG | |
| | AGACCCTGGACGACATCTTTGAGCA | |
| | GTGGGCTCACTCTGAAGACCTGCAG | |
| | TCCCTCCTGCTTAGGGTCGCTAATG | |
| | CTGTTTCGGTGAAAGGGATTTATAAA | |
| | CAGATGCCTGGTTGCTTTAATTTCCT | |
| | CCGGAAAAAACTTTTCTTTAAAACAT | |
| | CAGCTAGCAGAGCC-(T2A) | |
| Fv-iCASP9 L329G-T2A | SEQ ID NO: 84 | SEQ ID NO: 85 |
| | GTCGACGGATTTGGTGATGTCGGTG | VDGFGDVGALESLRGNADLAYILSM |
| | CTCTTGAGAGTTTGAGGGGAAATGC | EPCGHCLIINNVNFCRESGLRTRTG |
| | AGATTTGGCTTACATCCTGAGCATG | SNIDCEKLRRRFSSLHFMVEVKGDL |
| | GAGCCCTGTGGCCACTGCCTCATTA | TAKKMVLALLELARQDHGALDCCV |
| | TCAACAATGTGAACTTCTGCCGTGA | VVILSHGCQASHLQFPGAVYGTDG |
| | GTCCGGGCTCCGCACCCGCACTGG | CPVSVEKIVNIFNGTSCPSLGGKPK |
| | CTCCAACATCGACTGTGAGAAGTTG | LFFIQACGGEQKDHGFEVASTSPE |
| | CGGCGTCGCTTCTCCTCGCTGCATT | DESPGSNPEPDATPFQEGLRTFDQ |
| | TCATGGTGGAGGTGAAGGGCGACCT | gDAISSLPTPSDIFVSYSTFPGFVSW |
| | GACTGCCAAGAAAATGGTGCTGGCT | RDPKSGSVVYVETLDDIFEQWAHSE |
| | TTGCTGGAGCTGGCGCGGCAGGAC | DLQSLLLRVANAVSVKGIYKQMPGC |
| | CACGGTGCTCTGGACTGCTGCGTGG | FNFLRKKLFFKTSASRA |
| | TGGTCATTCTCTCTCACGGCTGTCA | |
| | GGCCAGCCACCTGCAGTTCCCAGG | |
| | GGCTGTCTACGGCACAGATGGATGC | |
| | CCTGTGTCGGTCGAGAAGATTGTGA | |
| | ACATCTTCAATGGGACCAGCTGCCC | |
| | CAGCCTGGGAGGGAAGCCCAAGCT | |
| | CTTTTTCATCCAGGCCTGTGGTGGG | |
| | GAGCAGAAAGACCATGGGTTTGAGG | |
| | TGGCCTCCACTTCCCCTGAAGACGA | |
| | GTCCCCTGGCAGTAACCCCGAGCCA | |
| | GATGCCACCCCGTTCCAGGAAGGTT | |
| | TGAGGACCTTCGACCAGggcGACGC | |
| | CATATCTAGTTTGCCCACACCCAGT | |
| | GACATCTTTGTGTCCTACTCTACTTT | |
| | CCCAGGTTTTGTTTCCTGGAGGGAC | |
| | CCCAAGAGTGGCTCCTGGTACGTTG | |
| | AGACCCTGGACGACATCTTTGAGCA | |
| | GTGGGCTCACTCTGAAGACCTGCAG | |
| | TCCCTCCTGCTTAGGGTCGCTAATG | |
| | CTGTTTCGGTGAAAGGGATTTATAAA | |
| | CAGATGCCTGGTTGCTTTAATTTCCT | |
| | CCGGAAAAAACTTTTCTTTAAAACAT | |
| | CAGCTAGCAGAGCC | |
| Fv-L-Caspase9 D330A- | SEQ ID NO: 86 | SEQ ID NO: 87 |
| T2A | (Fv-L)- | (Fv-L)- |
| | GTCGACGGATTTGGTGATGTCGGTG | VDGFGDVGALESLRGNADLAYILSM |
| | CTCTTGAGAGTTTGAGGGGAAATGC | EPCGHCLIINNVNFCRESGLRTRTG |
| | AGATTTGGCTTACATCCTGAGCATG | SNIDCEKLRRRFSS |
| | GAGCCCTGTGGCCACTGCCTCATTA | LHFMVEVKGDLTAKKMVLALLELAR |
| | TCAACAATGTGAACTTCTGCCGTGA | QDHGALDCCVVVILSHGCQASHLQ |
| | GTCCGGGCTCCGCACCCGCACTGG | FPGAVYGTDGC |
| | CTCCAACATCGACTGTGAGAAGTTG | PVSVEKIVNIFNGTSCPSLGGKPKLF |
| | CGGCGTCGCTTCTCCTCGCTGCATT | FIQACGGEQKDHGFEVASTSPEDE |
| | TCATGGTGGAGGTGAAGGGCGACCT | SPGSNPEPDA |
| | GACTGCCAAGAAAATGGTGCTGGCT | TPFQEGLRTFDQLaAISSLPTPSDIF |
| | TTGCTGGAGCTGGCGCGGCAGGAC | VSYSTFPGFVSWRDPKSGSVVYVET |
| | CACGGTGCTCTGGACTGCTGCGTGG | LDDIFEQWAH |
| | TGGTCATTCTCTCTCACGGCTGTCA | SEDLQSLLLRVANAVSVKGIYKQMP |
| | GGCCAGCCACCTGCAGTTCCCAGG | GCFNFLRKKLFFKTSASRA-(T2A) |
| | GGCTGTCTACGGCACAGATGGATGC | |
| | CCTGTGTCGGTCGAGAAGATTGTGA | |
| | ACATCTTCAATGGGACCAGCTGCCC | |
| | CAGCCTGGGAGGGAAGCCCAAGCT | |
| | CTTTTTCATCCAGGCCTGTGGTGGG | |
| | GAGCAGAAAGACCATGGGTTTGAGG | |
| | TGGCCTCCACTTCCCCTGAAGACGA | |
| | GTCCCCTGGCAGTAACCCCGAGCCA | |
| | GATGCCACCCCGTTCCAGGAAGGTT | |
| | TGAGGACCTTCGACCAGCTGGcCGC | |
| | CATATCTAGTTTGCCCACACCCAGT | |
| | GACATCTTTGTGTCCTACTCTACTTT | |
| | CCCAGGTTTTGTTTCCTGGAGGGAC | |
| | CCCAAGAGTGGCTCCTGGTACGTTG | |
| | AGACCCTGGACGACATCTTTGAGCA | |
| | GTGGGCTCACTCTGAAGACCTGCAG | |
| | TCCCTCCTGCTTAGGGTCGCTAATG | |
| | CTGTTTCGGTGAAAGGGATTTATAAA | |
| | CAGATGCCTGGTTGCTTTAATTTCCT | |
| | CCGGAAAAAACTTTTCTTTAAAACAT | |
| | CAGCTAGCAGAGCC-(T2A) | |
| Fv-L-Caspase9 D330E- | SEQ ID NO: 88 | SEQ ID NO: 89 |
| T2A | (Fv-L)- | (Fv-L)- |
| | GTCGACGGATTTGGTGATGTCGGTG | VDGFGDVGALESLRGNADLAYILSM |
| | CTCTTGAGAGTTTGAGGGGAAATGC | EPCGHCLIINNVNFCRESGLRTRTG |
| | AGATTTGGCTTACATCCTGAGCATG | SNIDCEKLRRRFSS |
| | GAGCCCTGTGGCCACTGCCTCATTA | LHFMVEVKGDLTAKKMVLALLELAR |
| | TCAACAATGTGAACTTCTGCCGTGA | QDHGALDCCVVVILSHGCQASHLQ |
| | GTCCGGGCTCCGCACCCGCACTGG | FPGAVYGTDGC |
| | CTCCAACATCGACTGTGAGAAGTTG | PVSVEKIVNIFNGTSCPSLGGKPKLF |
| | CGGCGTCGCTTCTCCTCGCTGCATT | FIQACGGEQKDHGFEVASTSPEDE |
| | TCATGGTGGAGGTGAAGGGCGACCT | SPGSNPEPDA |
| | GACTGCCAAGAAAATGGTGCTGGCT | TPFQEGLRTFDQLeAISSLPTPSDIF |
| | TTGCTGGAGCTGGCGCGGCAGGAC | VSYSTFPGFVSWRDPKSGSVVYVET |
| | CACGGTGCTCTGGACTGCTGCGTGG | LDDIFEQWAH |
| | TGGTCATTCTCTCTCACGGCTGTCA | SEDLQSLLLRVANAVSVKGIYKQMP |
| | GGCCAGCCACCTGCAGTTCCCAGG | GCFNFLRKKLFFKTSASRA-(T2A) |
| | GGCTGTCTACGGCACAGATGGATGC | |
| | CCTGTGTCGGTCGAGAAGATTGTGA | |
| | ACATCTTCAATGGGACCAGCTGCCC | |
| | CAGCCTGGGAGGGAAGCCCAAGCT | |
| | CTTTTTCATCCAGGCCTGTGGTGGG | |
| | GAGCAGAAAGACCATGGGTTTGAGG | |
| | TGGCCTCCACTTCCCCTGAAGACGA | |
| | GTCCCCTGGCAGTAACCCCGAGCCA | |
| | GATGCCACCCCGTTCCAGGAAGGTT | |
| | TGAGGACCTTCGACCAGCTGGcCGC | |
| | CATATCTAGTTTGCCCACACCCAGT | |
| | GACATCTTTGTGTCCTACTCTACTTT | |
| | CCCAGGTTTTGTTTCCTGGAGGGAC | |
| | CCCAAGAGTGGCTCCTGGTACGTTG | |
| | AGACCCTGGACGACATCTTTGAGCA | |
| | GTGGGCTCACTCTGAAGACCTGCAG | |
| | TCCCTCCTGCTTAGGGTCGCTAATG | |
| | CTGTTTCGGTGAAAGGGATTTATAAA | |
| | CAGATGCCTGGTTGCTTTAATTTCCT | |
| | CCGGAAAAAACTTTTCTTTAAAACAT | |
| | CAGCTAGCAGAGCC-(T2A) | |
| Fv-L-Caspase9 D330N- | SEQ ID NO: 90 | SEQ ID NO: 91 |
| T2A | (Fv-L)- | (Fv-L)- |
| | GTCGACGGATTTGGTGATGTCGGTG | VDGFGDVGALESLRGNADLAYILSM |
| | CTCTTGAGAGTTTGAGGGGAAATGC | EPCGHCLIINNVNFCRESGLRTRTG |
| | AGATTTGGCTTACATCCTGAGCATG | SNIDCEKLRRRFSS |
| | GAGCCCTGTGGCCACTGCCTCATTA | LHFMVEVKGDLTAKKMVLALLELAR |
| | TCAACAATGTGAACTTCTGCCGTGA | QDHGALDCCVVVILSHGCQASHLQ |
| | GTCCGGGCTCCGCACCCGCACTGG | FPGAVYGTDGC |
| | CTCCAACATCGACTGTGAGAAGTTG | PVSVEKIVNIFNGTSCPSLGGKPKLF |
| | CGGCGTCGCTTCTCCTCGCTGCATT | FIQACGGEQKDHGFEVASTSPEDE |
| | TCATGGTGGAGGTGAAGGGCGACCT | SPGSNPEPDA |
| | GACTGCCAAGAAAATGGTGCTGGCT | TPFQEGLRTFDQLnAISSLPTPSDIF |
| | TTGCTGGAGCTGGCGCGGCAGGAC | VSYSTFPGFVSWRDPKSGSVVYVET |
| | CACGGTGCTCTGGACTGCTGCGTGG | LDDIFEQWAH |
| | TGGTCATTCTCTCTCACGGCTGTCA | SEDLQSLLLRVANAVSVKGIYKQMP |
| | GGCCAGCCACCTGCAGTTCCCAGG | GCFNFLRKKLFFKTSASRA-(T2A) |
| | GGCTGTCTACGGCACAGATGGATGC | |
| | CCTGTGTCGGTCGAGAAGATTGTGA | |
| | ACATCTTCAATGGGACCAGCTGCCC | |
| | CAGCCTGGGAGGGAAGCCCAAGCT | |
| | CTTTTTCATCCAGGCCTGTGGTGGG | |
| | GAGCAGAAAGACCATGGGTTTGAGG | |
| | TGGCCTCCACTTCCCCTGAAGACGA | |
| | GTCCCCTGGCAGTAACCCCGAGCCA | |
| | GATGCCACCCCGTTCCAGGAAGGTT | |
| | TGAGGACCTTCGACCAGCTGGcCGC | |
| | CATATCTAGTTTGCCCACACCCAGT | |
| | GACATCTTTGTGTCCTACTCTACTTT | |
| | CCCAGGTTTTGTTTCCTGGAGGGAC | |
| | CCCAAGAGTGGCTCCTGGTACGTTG | |
| | AGACCCTGGACGACATCTTTGAGCA | |
| | GTGGGCTCACTCTGAAGACCTGCAG | |
| | TCCCTCCTGCTTAGGGTCGCTAATG | |
| | CTGTTTCGGTGAAAGGGATTTATAAA | |
| | CAGATGCCTGGTTGCTTTAATTTCCT | |
| | CCGGAAAAAACTTTTCTTTAAAACAT | |
| | CAGCTAGCAGAGCC-(T2A) | |
| Fv-L-Caspase9 D330V- | SEQ ID NO: 92 | SEQ ID NO: 93 |
| T2A | (Fv-L)- | (Fv-L)- |
| | GTCGACGGATTTGGTGATGTCGGTG | VDGFGDVGALESLRGNADLAYILSM |
| | CTCTTGAGAGTTTGAGGGGAAATGC | EPCGHCLIINNVNFCRESGLRTRTG |
| | AGATTTGGCTTACATCCTGAGCATG | SNIDCEKLRRRFSS |
| | GAGCCCTGTGGCCACTGCCTCATTA | LHFMVEVKGDLTAKKMVLALLELAR |
| | TCAACAATGTGAACTTCTGCCGTGA | QDHGALDCCVVVILSHGCQASHLQ |
| | GTCCGGGCTCCGCACCCGCACTGG | FPGAVYGTDGC |
| | CTCCAACATCGACTGTGAGAAGTTG | PVSVEKIVNIFNGTSCPSLGGKPKLF |
| | CGGCGTCGCTTCTCCTCGCTGCATT | FIQACGGEQKDHGFEVASTSPEDE |
| | TCATGGTGGAGGTGAAGGGCGACCT | SPGSNPEPDA |
| | GACTGCCAAGAAAATGGTGCTGGCT | TPFQEGLRTFDQLvAISSLPTPSDIF |
| | TTGCTGGAGCTGGCGCGGCAGGAC | VSYSTFPGFVSWRDPKSGSVVYVET |
| | CACGGTGCTCTGGACTGCTGCGTGG | LDDIFEQWAH |
| | TGGTCATTCTCTCTCACGGCTGTCA | SEDLQSLLLRVANAVSVKGIYKQMP |
| | GGCCAGCCACCTGCAGTTCCCAGG | GCFNFLRKKLFFKTSASRA-(T2A) |
| | GGCTGTCTACGGCACAGATGGATGC | |
| | CCTGTGTCGGTCGAGAAGATTGTGA | |
| | ACATCTTCAATGGGACCAGCTGCCC | |
| | CAGCCTGGGAGGGAAGCCCAAGCT | |
| | CTTTTTCATCCAGGCCTGTGGTGGG | |
| | GAGCAGAAAGACCATGGGTTTGAGG | |
| | TGGCCTCCACTTCCCCTGAAGACGA | |
| | GTCCCCTGGCAGTAACCCCGAGCCA | |
| | GATGCCACCCCGTTCCAGGAAGGTT | |
| | TGAGGACCTTCGACCAGCTGGcCGC | |
| | CATATCTAGTTTGCCCACACCCAGT | |
| | GACATCTTTGTGTCCTACTCTACTTT | |
| | CCCAGGTTTTGTTTCCTGGAGGGAC | |
| | CCCAAGAGTGGCTCCTGGTACGTTG | |
| | AGACCCTGGACGACATCTTTGAGCA | |
| | GTGGGCTCACTCTGAAGACCTGCAG | |
| | TCCCTCCTGCTTAGGGTCGCTAATG | |
| | CTGTTTCGGTGAAAGGGATTTATAAA | |
| | CAGATGCCTGGTTGCTTTAATTTCCT | |
| | CCGGAAAAAACTTTTCTTTAAAACAT | |
| | CAGCTAGCAGAGCC-(T2A) | |
| Fv-L-Caspase9 D330G- | SEQ ID NO: 94 | SEQ ID NO: 95 |
| T2A | (Fv-L)- | (Fv-L)- |
| | GTCGACGGATTTGGTGATGTCGGTG | VDGFGDVGALESLRGNADLAYILSM |
| | CTCTTGAGAGTTTGAGGGGAAATGC | EPCGHCLIINNVNFCRESGLRTRTG |
| | AGATTTGGCTTACATCCTGAGCATG | SNIDCEKLRRRFSS |
| | GAGCCCTGTGGCCACTGCCTCATTA | LHFMVEVKGDLTAKKMVLALLELAR |
| | TCAACAATGTGAACTTCTGCCGTGA | QDHGALDCCVVVILSHGCQASHLQ |
| | GTCCGGGCTCCGCACCCGCACTGG | FPGAVYGTDGC |
| | CTCCAACATCGACTGTGAGAAGTTG | PVSVEKIVNIFNGTSCPSLGGKPKLF |
| | CGGCGTCGCTTCTCCTCGCTGCATT | FIQACGGEQKDHGFEVASTSPEDE |
| | TCATGGTGGAGGTGAAGGGCGACCT | SPGSNPEPDA |
| | GACTGCCAAGAAAATGGTGCTGGCT | TPFQEGLRTFDQLgAISSLPTPSDIF |
| | TTGCTGGAGCTGGCGCGGCAGGAC | VSYSTFPGFVSWRDPKSGSVVYVET |
| | CACGGTGCTCTGGACTGCTGCGTGG | LDDIFEQWAH |
| | TGGTCATTCTCTCTCACGGCTGTCA | SEDLQSLLLRVANAVSVKGIYKQMP |
| | GGCCAGCCACCTGCAGTTCCCAGG | GCFNFLRKKLFFKTSASRA-(T2A) |
| | GGCTGTCTACGGCACAGATGGATGC | |
| | CCTGTGTCGGTCGAGAAGATTGTGA | |
| | ACATCTTCAATGGGACCAGCTGCCC | |
| | CAGCCTGGGAGGGAAGCCCAAGCT | |
| | CTTTTTCATCCAGGCCTGTGGTGGG | |
| | GAGCAGAAAGACCATGGGTTTGAGG | |
| | TGGCCTCCACTTCCCCTGAAGACGA | |
| | GTCCCCTGGCAGTAACCCCGAGCCA | |
| | GATGCCACCCCGTTCCAGGAAGGTT | |
| | TGAGGACCTTCGACCAGCTGGcCGC | |
| | CATATCTAGTTTGCCCACACCCAGT | |
| | GACATCTTTGTGTCCTACTCTACTTT | |
| | CCCAGGTTTTGTTTCCTGGAGGGAC | |
| | CCCAAGAGTGGCTCCTGGTACGTTG | |
| | AGACCCTGGACGACATCTTTGAGCA | |
| | GTGGGCTCACTCTGAAGACCTGCAG | |
| | TCCCTCCTGCTTAGGGTCGCTAATG | |
| | CTGTTTCGGTGAAAGGGATTTATAAA | |
| | CAGATGCCTGGTTGCTTTAATTTCCT | |
| | CCGGAAAAAACTTTTCTTTAAAACAT | |
| | CAGCTAGCAGAGCC-(T2A) | |
| Fv-L-Caspase9 D330S- | SEQ ID NO: 96 | SEQ ID NO: 97 |
| T2A | (Fv-L)- | (Fv-L)- |
| | GTCGACGGATTTGGTGATGTCGGTG | VDGFGDVGALESLRGNADLAYILSM |
| | CTCTTGAGAGTTTGAGGGGAAATGC | EPCGHCLIINNVNFCRESGLRTRTG |
| | AGATTTGGCTTACATCCTGAGCATG | SNIDCEKLRRRFSS |
| | GAGCCCTGTGGCCACTGCCTCATTA | LHFMVEVKGDLTAKKMVLALLELAR |
| | TCAACAATGTGAACTTCTGCCGTGA | QDHGALDCCVVVILSHGCQASHLQ |
| | GTCCGGGCTCCGCACCCGCACTGG | FPGAVYGTDGC |
| | CTCCAACATCGACTGTGAGAAGTTG | PVSVEKIVNIFNGTSCPSLGGKPKLF |
| | CGGCGTCGCTTCTCCTCGCTGCATT | FIQACGGEQKDHGFEVASTSPEDE |
| | TCATGGTGGAGGTGAAGGGCGACCT | SPGSNPEPDA |
| | GACTGCCAAGAAAATGGTGCTGGCT | TPFQEGLRTFDQLsAISSLPTPSDIF |
| | TTGCTGGAGCTGGCGCGGCAGGAC | VSYSTFPGFVSWRDPKSGSVVYVET |
| | CACGGTGCTCTGGACTGCTGCGTGG | LDDIFEQWAH |
| | TGGTCATTCTCTCTCACGGCTGTCA | SEDLQSLLLRVANAVSVKGIYKQMP |
| | GGCCAGCCACCTGCAGTTCCCAGG | GCFNFLRKKLFFKTSASRA-(T2A) |
| | GGCTGTCTACGGCACAGATGGATGC | |
| | CCTGTGTCGGTCGAGAAGATTGTGA | |
| | ACATCTTCAATGGGACCAGCTGCCC | |
| | CAGCCTGGGAGGGAAGCCCAAGCT | |
| | CTTTTTCATCCAGGCCTGTGGTGGG | |
| | GAGCAGAAAGACCATGGGTTTGAGG | |
| | TGGCCTCCACTTCCCCTGAAGACGA | |
| | GTCCCCTGGCAGTAACCCCGAGCCA | |
| | GATGCCACCCCGTTCCAGGAAGGTT | |
| | TGAGGACCTTCGACCAGCTGGcCGC | |
| | CATATCTAGTTTGCCCACACCCAGT | |
| | GACATCTTTGTGTCCTACTCTACTTT | |
| | CCCAGGTTTTGTTTCCTGGAGGGAC | |
| | CCCAAGAGTGGCTCCTGGTACGTTG | |
| | AGACCCTGGACGACATCTTTGAGCA | |
| | GTGGGCTCACTCTGAAGACCTGCAG | |
| | TCCCTCCTGCTTAGGGTCGCTAATG | |
| | CTGTTTCGGTGAAAGGGATTTATAAA | |
| | CAGATGCCTGGTTGCTTTAATTTCCT | |
| | CCGGAAAAAACTTTTCTTTAAAACAT | |
| | CAGCTAGCAGAGCC-(T2A) | |
| Fv-iCASP9 A331K-T2A | SEQ ID NO: 98 | SEQ ID NO: 99 |
| | (Fv-L)- | (Fv-L)- |
| | GTCGACGGATTTGGTGATGTCGGTG | VDGFGDVGALESLRGNADLAYILSM |
| | CTCTTGAGAGTTTGAGGGGAAATGC | EPCGHCLIINNVNFCRESGLRTRTG |
| | AGATTTGGCTTACATCCTGAGCATG | SNIDCEKLRRRFSSLHFMVEVKGDL |
| | GAGCCCTGTGGCCACTGCCTCATTA | TAKKMVLALLELARQDHGALDCCV |
| | TCAACAATGTGAACTTCTGCCGTGA | VVILSHGCQASHLQFPGAVYGTDG |
| | GTCCGGGCTCCGCACCCGCACTGG | CPVSVEKIVNIFNGTSCPSLGGKPK |
| | CTCCAACATCGACTGTGAGAAGTTG | LFFIQACGGEQKDHGFEVASTSPE |
| | CGGCGTCGCTTCTCCTCGCTGCATT | DESPGSNPEPDATPFQEGLRTFDQ |
| | TCATGGTGGAGGTGAAGGGCGACCT | LDklSSLPTPSDIFVSYSTFPGFVSW |
| | GACTGCCAAGAAAATGGTGCTGGCT | RDPKSGSVVYVETLDDIFEQWAHSE |
| | TTGCTGGAGCTGGCGCGGCAGGAC | DLQSLLLRVANAVSVKGIYKQMPGC |
| | CACGGTGCTCTGGACTGCTGCGTGG | FNFLRKKLFFKTSASRA-(T2A) |
| | TGGTCATTCTCTCTCACGGCTGTCA | |
| | GGCCAGCCACCTGCAGTTCCCAGG | |
| | GGCTGTCTACGGCACAGATGGATGC | |
| | CCTGTGTCGGTCGAGAAGATTGTGA | |
| | ACATCTTCAATGGGACCAGCTGCCC | |
| | CAGCCTGGGAGGGAAGCCCAAGCT | |
| | CTTTTTCATCCAGGCCTGTGGTGGG | |
| | GAGCAGAAAGACCATGGGTTTGAGG | |
| | TGGCCTCCACTTCCCCTGAAGACGA | |
| | GTCCCCTGGCAGTAACCCCGAGCCA | |
| | GATGCCACCCCGTTCCAGGAAGGTT | |
| | TGAGGACCTTCGACCAGCTGGACaa | |
| | gATATCTAGTTTGCCCACACCCAGTG | |
| | ACATCTTTGTGTCCTACTCTACTTTC | |
| | CCAGGTTTTGTTTCCTGGAGGGACC | |
| | CCAAGAGTGGCTCCTGGTACGTTGA | |
| | GACCCTGGACGACATCTTTGAGCAG | |
| | TGGGCTCACTCTGAAGACCTGCAGT | |
| | CCCTCCTGCTTAGGGTCGCTAATGC | |
| | TGTTTCGGTGAAAGGGATTTATAAAC | |
| | AGATGCCTGGTTGCTTTAATTTCCTC | |
| | CGGAAAAAACTTTTCTTTAAAACATC | |
| | AGCTAGCAGAGCC-(T2A) | |
| Fv-L-iCaspase9 F404Y- | SEQ ID NO: 100 | SEQ ID NO: 101 |
| T2A | (Fv-L)- | (Fv-L)- |
| | GTCGACGGATTTGGTGATGTCGGTG | VDGFGDVGALESLRGNADLAYILSM |
| | CTCTTGAGAGTTTGAGGGGAAATGC | EPCGHCLIINNVNFCRESGLRTRTG |
| | AGATTTGGCTTACATCCTGAGCATG | SNIDCEKLRRRFSS |
| | GAGCCCTGTGGCCACTGCCTCATTA | LHFMVEVKGDLTAKKMVLALLELAR |
| | TCAACAATGTGAACTTCTGCCGTGA | QDHGALDCCVVVILSHGCQASHLQ |
| | GTCCGGGCTCCGCACCCGCACTGG | FPGAVYGTDGC |
| | CTCCAACATCGACTGTGAGAAGTTG | PVSVEKIVNIFNGTSCPSLGGKPKLF |
| | CGGCGTCGCTTCTCCTCGCTGCATT | FIQACGGEQKDHGFEVASTSPEDE |
| | TCATGGTGGAGGTGAAGGGCGACCT | SPGSNPEPDA |
| | GACTGCCAAGAAAATGGTGCTGGCT | TPFQEGLRTFDQLDAISSLPTPSDIF |
| | TTGCTGGAGCTGGCGCGGCAGGAC | VSYSTFPGFVSWRDPKSGSVVYVET |
| | CACGGTGCTCTGGACTGCTGCGTGG | LDDIFEQWAH |
| | TGGTCATTCTCTCTCACGGCTGTCA | SEDLQSLLLRVANAVSVKGIYKQMP |
| | GGCCAGCCACCTGCAGTTCCCAGG | GCyNFLRKKLFFKTSASRA-(T2A) |
| | GGCTGTCTACGGCACAGATGGATGC | |
| | CCTGTGTCGGTCGAGAAGATTGTGA | |
| | ACATCTTCAATGGGACCAGCTGCCC | |
| | CAGCCTGGGAGGGAAGCCCAAGCT | |
| | CTTTTTCATCCAGGCCTGTGGTGGG | |
| | GAGCAGAAAGACCATGGGTTTGAGG | |
| | TGGCCTCCACTTCCCCTGAAGACGA | |
| | GTCCCCTGGCAGTAACCCCGAGCCA | |
| | GATGCCACCCCGTTCCAGGAAGGTT | |
| | TGAGGACCTTCGACCAGCTGGACGC | |
| | CATATCTAGTTTGCCCACACCCAGT | |
| | GACATCTTTGTGTCCTACTCTACTTT | |
| | CCCAGGTTTTGTTTCCTGGAGGGAC | |
| | CCCAAGAGTGGCTCCTGGTACGTTG | |
| | AGACCCTGGACGACATCTTTGAGCA | |
| | GTGGGCTCACTCTGAAGACCTGCAG | |
| | TCCCTCCTGCTTAGGGTCGCTAATG | |
| | CTGTTTCGGTGAAAGGGATTTATAAA | |
| | CAGATGCCTGGTTGCTaTAATTTCCT | |
| | CCGGAAAAAACTTTTCTTTAAAACAT | |
| | CAGCTAGCAGAGCC-(T2A) | |
| Fv-L-ICASP9 F404W-T2A | SEQ ID NO: 102 | SEQ ID NO: 103 |
| | (Fv-L)- | (Fv-L)- |
| | GTCGACGGATTTGGTGATGTCGGTG | VDGFGDVGALESLRGNADLAYILSM |
| | CTCTTGAGAGTTTGAGGGGAAATGC | EPCGHCLIINNVNFCRESGLRTRTG |
| | AGATTTGGCTTACATCCTGAGCATG | SNIDCEKLRRRFSS |
| | GAGCCCTGTGGCCACTGCCTCATTA | LHFMVEVKGDLTAKKMVLALLELAR |
| | TCAACAATGTGAACTTCTGCCGTGA | QDHGALDCCVVVILSHGCQASHLQ |
| | GTCCGGGCTCCGCACCCGCACTGG | FPGAVYGTDGC |
| | CTCCAACATCGACTGTGAGAAGTTG | PVSVEKIVNIFNGTSCPSLGGKPKLF |
| | CGGCGTCGCTTCTCCTCGCTGCATT | FIQACGGEQKDHGFEVASTSPEDE |
| | TCATGGTGGAGGTGAAGGGCGACCT | SPGSNPEPDA |
| | GACTGCCAAGAAAATGGTGCTGGCT | TPFQEGLRTFDQLDAISSLPTPSDIF |
| | TTGCTGGAGCTGGCGCGGCAGGAC | VSYSTFPGFVSWRDPKSGSVVYVET |
| | CACGGTGCTCTGGACTGCTGCGTGG | LDDIFEQWAH |
| | TGGTCATTCTCTCTCACGGCTGTCA | SEDLQSLLLRVANAVSVKGIYKQMP |
| | GGCCAGCCACCTGCAGTTCCCAGG | GCwNFLRKKLFFKTSASRA-(T2A) |
| | GGCTGTCTACGGCACAGATGGATGC | |
| | CCTGTGTCGGTCGAGAAGATTGTGA | |
| | ACATCTTCAATGGGACCAGCTGCCC | |
| | CAGCCTGGGAGGGAAGCCCAAGCT | |
| | CTTTTTCATCCAGGCCTGTGGTGGG | |
| | GAGCAGAAAGACCATGGGTTTGAGG | |
| | TGGCCTCCACTTCCCCTGAAGACGA | |
| | GTCCCCTGGCAGTAACCCCGAGCCA | |
| | GATGCCACCCCGTTCCAGGAAGGTT | |
| | TGAGGACCTTCGACCAGCTGGACGC | |
| | CATATCTAGTTTGCCCACACCCAGT | |
| | GACATCTTTGTGTCCTACTCTACTTT | |
| | CCCAGGTTTTGTTTCCTGGAGGGAC | |
| | CCCAAGAGTGGCTCCTGGTACGTTG | |
| | AGACCCTGGACGACATCTTTGAGCA | |
| | GTGGGCTCACTCTGAAGACCTGCAG | |
| | TCCCTCCTGCTTAGGGTCGCTAATG | |
| | CTGTTTCGGTGAAAGGGATTTATAAA | |
| | CAGATGCCTGGTTGCTggAATTTCCT | |
| | CCGGAAAAAACTTTTCTTTAAAACAT | |
| | CAGCTAGCAGAGCC-(T2A) | |
| Fv-L-iCaspase9 N405Q- | SEQ ID NO: 104 | SEQ ID NO: 105 |
| T2A | (Fv-L)- | (Fv-L)- |
| | GTCGACGGATTTGGTGATGTCGGTG | VDGFGDVGALESLRGNADLAYILSM |
| | CTCTTGAGAGTTTGAGGGGAAATGC | EPCGHCLIINNVNFCRESGLRTRTG |
| | AGATTTGGCTTACATCCTGAGCATG | SNIDCEKLRRRFSS |
| | GAGCCCTGTGGCCACTGCCTCATTA | LHFMVEVKGDLTAKKMVLALLELAR |
| | TCAACAATGTGAACTTCTGCCGTGA | QDHGALDCCVVVILSHGCQASHLQ |
| | GTCCGGGCTCCGCACCCGCACTGG | FPGAVYGTDGC |
| | CTCCAACATCGACTGTGAGAAGTTG | PVSVEKIVNIFNGTSCPSLGGKPKLF |
| | CGGCGTCGCTTCTCCTCGCTGCATT | FIQACGGEQKDHGFEVASTSPEDE |
| | TCATGGTGGAGGTGAAGGGCGACCT | SPGSNPEPDA |
| | GACTGCCAAGAAAATGGTGCTGGCT | TPFQEGLRTFDQLDAISSLPTPSDIF |
| | TTGCTGGAGCTGGCGCGGCAGGAC | VSYSTFPGFVSWRDPKSGSVVYVET |
| | CACGGTGCTCTGGACTGCTGCGTGG | LDDIFEQWAH |
| | TGGTCATTCTCTCTCACGGCTGTCA | SEDLQSLLLRVANAVSVKGIYKQMP |
| | GGCCAGCCACCTGCAGTTCCCAGG | GCFqFLRKKLFFKTSASRA-(T2A) |
| | GGCTGTCTACGGCACAGATGGATGC | |
| | CCTGTGTCGGTCGAGAAGATTGTGA | |
| | ACATCTTCAATGGGACCAGCTGCCC | |
| | CAGCCTGGGAGGGAAGCCCAAGCT | |
| | CTTTTTCATCCAGGCCTGTGGTGGG | |
| | GAGCAGAAAGACCATGGGTTTGAGG | |
| | TGGCCTCCACTTCCCCTGAAGACGA | |
| | GTCCCCTGGCAGTAACCCCGAGCCA | |
| | GATGCCACCCCGTTCCAGGAAGGTT | |
| | TGAGGACCTTCGACCAGCTGGACGC | |
| | CATATCTAGTTTGCCCACACCCAGT | |
| | GACATCTTTGTGTCCTACTCTACTTT | |
| | CCCAGGTTTTGTTTCCTGGAGGGAC | |
| | CCCAAGAGTGGCTCCTGGTACGTTG | |
| | AGACCCTGGACGACATCTTTGAGCA | |
| | GTGGGCTCACTCTGAAGACCTGCAG | |
| | TCCCTCCTGCTTAGGGTCGCTAATG | |
| | CTGTTTCGGTGAAAGGGATTTATAAA | |
| | CAGATGCCTGGTTGCTTTcagTTCCT | |
| | CCGGAAAAAACTTTTCTTTAAAACAT | |
| | CAGCTAGCAGAGCC-(T2A) | |
| Fv-L-iCaspase9 N405Q | SEQ ID NO: 106 | SEQ ID NO: 107 |
| codon optimized-T2A | -(Fv-L)- | (Fv-L)- |
| | GTGGACGGGTTTGGAGATGTGGGA | VDGFGDVGALESLRGNADLAYILSM |
| | GCCCTGGAATCCCTGCGGGGCAAT | EPCGHCLIINNVNFCRESGLRTRTG |
| | GCCGATCTGGCTTACATCCTGTCTAT | SNIDCEKLRRRFSS |
| | GGAGCCTTGCGGCCACTGTCTGATC | LHFMVEVKGDLTAKKMVLALLELAR |
| | ATTAACAATGTGAACTTCTGCAGAGA | QDHGALDCCVVVILSHGCQASHLQ |
| | GAGCGGGCTGCGGACCAGAACAGG | FPGAVYGTDGC |
| | ATCCAATATTGACTGTGAAAAGCTGC | PVSVEKIVNIFNGTSCPSLGGKPKLF |
| | GGAGAAGGTTCTCTAGTCTGCACTT | FIQACGGEQKDHGFEVASTSPEDE |
| | TATGGTCGAGGTGAAAGGCGATCTG | SPGSNPEPDA |
| | ACCGCTAAGAAAATGGTGCTGGCCC | TPFQEGLRTFDQLDAISSLPTPSDIF |
| | TGCTGGAACTGGCTCGGCAGGACCA | VSYSTFPGFVSWRDPKSGSVVYVET |
| | TGGGGCACTGGATTGCTGCGTGGTC | LDDIFEQWAH |
| | GTGATCCTGAGTCACGGCTGCCAGG | SEDLQSLLLRVANAVSVKGIYKQMP |
| | CTTCACATCTGCAGTTCCCTGGGGC | GCFqFLRKKLFFKTSASRA-(T2A) |
| | AGTCTATGGAACTGACGGCTGTCCA | |
| | GTCAGCGTGGAGAAGATCGTGAACA | |
| | TCTTCAACGGCACCTCTTGCCCAAG | |
| | TCTGGGCGGGAAGCCCAAACTGTTC | |
| | TTTATTCAGGCCTGTGGAGGCGAGC | |
| | AGAAAGATCACGGCTTCGAAGTGGC | |
| | TAGCACCTCCCCCGAGGACGAATCA | |
| | CCTGGAAGCAACCCTGAGCCAGATG | |
| | CAACCCCCTTCCAGGAAGGCCTGAG | |
| | GACATTTGACCAGCTGGATGCCATC | |
| | TCAAGCCTGCCCACACCTTCTGACA | |
| | TTTTCGTCTCTTACAGTACTTTCCCT | |
| | GGATTTGTGAGCTGGCGCGATCCAA | |
| | AGTCAGGCAGCTGGTACGTGGAGAC | |
| | ACTGGACGATATCTTTGAGCAGTGG | |
| | GCCCATTCTGAAGACCTGCAGAGTC | |
| | TGCTGCTGCGAGTGGCCAATGCTGT | |
| | CTCTGTGAAGGGGATCTACAAACAG | |
| | ATGCCAGGATGCTTCcagTTTCTGAG | |
| | AAAGAAACTGTTCTTTAAGACCTCCG | |
| | CATCTAGGGCC-(T2A) | |
| Fv-iCASP9 F406L-T2A | SEQ ID NO: 108 | SEQ ID NO: 109 |
| | (Fv-L)- | (Fv-L)- |
| | GTCGACGGATTTGGTGATGTCGGTG | VDGFGDVGALESLRGNADLAYILSM |
| | CTCTTGAGAGTTTGAGGGGAAATGC | EPCGHCLIINNVNFCRESGLRTRTG |
| | AGATTTGGCTTACATCCTGAGCATG | SNIDCEKLRRRFSSLHFMVEVKGDL |
| | GAGCCCTGTGGCCACTGCCTCATTA | TAKKMVLALLELARQDHGALDCCV |
| | TCAACAATGTGAACTTCTGCCGTGA | VVILSHGCQASHLQFPGAVYGTDG |
| | GTCCGGGCTCCGCACCCGCACTGG | CPVSVEKIVNIFNGTSCPSLGGKPK |
| | CTCCAACATCGACTGTGAGAAGTTG | LFFIQACGGEQKDHGFEVASTSPE |
| | CGGCGTCGCTTCTCCTCGCTGCATT | DESPGSNPEPDATPFQEGLRTFDQ |
| | TCATGGTGGAGGTGAAGGGCGACCT | LDAISSLPTPSDIFVSYSTFPGFVSW |
| | GACTGCCAAGAAAATGGTGCTGGCT | RDPKSGSVVYVETLDDIFEQWAHSE |
| | TTGCTGGAGCTGGCGCGGCAGGAC | DLQSLLLRVANAVSVKGIYKQMPGC |
| | CACGGTGCTCTGGACTGCTGCGTGG | FNLLRKKLFFKTSASRA-(T2A) |
| | TGGTCATTCTCTCTCACGGCTGTCA | |
| | GGCCAGCCACCTGCAGTTCCCAGG | |
| | GGCTGTCTACGGCACAGATGGATGC | |
| | CCTGTGTCGGTCGAGAAGATTGTGA | |
| | ACATCTTCAATGGGACCAGCTGCCC | |
| | CAGCCTGGGAGGGAAGCCCAAGCT | |
| | CTTTTTCATCCAGGCCTGTGGTGGG | |
| | GAGCAGAAAGACCATGGGTTTGAGG | |
| | TGGCCTCCACTTCCCCTGAAGACGA | |
| | GTCCCCTGGCAGTAACCCCGAGCCA | |
| | GATGCCACCCCGTTCCAGGAAGGTT | |
| | TGAGGACCTTCGACCAGCTGGACGC | |
| | CATATCTAGTTTGCCCACACCCAGT | |
| | GACATCTTTGTGTCCTACTCTACTTT | |
| | CCCAGGTTTTGTTTCCTGGAGGGAC | |
| | CCCAAGAGTGGCTCCTGGTACGTTG | |
| | AGACCCTGGACGACATCTTTGAGCA | |
| | GTGGGCTCACTCTGAAGACCTGCAG | |
| | TCCCTCCTGCTTAGGGTCGCTAATG | |
| | CTGTTTCGGTGAAAGGGATTTATAAA | |
| | CAGATGCCTGGTTGCTTTAATcTCCT | |
| | CCGGAAAAAACTTTTCTTTAAAACAT | |
| | CAGCTAGCAGAGCC-(T2A) | |
| Fv-iCASP9 F406T-T2A | SEQ ID NO: 110 | SEQ ID NO: 111 |
| | (Fv-L)- | (Fv-L)- |
| | GTCGACGGATTTGGTGATGTCGGTG | VDGFGDVGALESLRGNADLAYILSM |
| | CTCTTGAGAGTTTGAGGGGAAATGC | EPCGHCLIINNVNFCRESGLRTRTG |
| | AGATTTGGCTTACATCCTGAGCATG | SNIDCEKLRRRFSSLHFMVEVKGDL |
| | GAGCCCTGTGGCCACTGCCTCATTA | TAKKMVLALLELARQDHGALDCCV |
| | TCAACAATGTGAACTTCTGCCGTGA | VVILSHGCQASHLQFPGAVYGTDG |
| | GTCCGGGCTCCGCACCCGCACTGG | CPVSVEKIVNIFNGTSCPSLGGKPK |
| | CTCCAACATCGACTGTGAGAAGTTG | LFFIQACGGEQKDHGFEVASTSPE |
| | CGGCGTCGCTTCTCCTCGCTGCATT | DESPGSNPEPDATPFQEGLRTFDQ |
| | TCATGGTGGAGGTGAAGGGCGACCT | LDAISSLPTPSDIFVSYSTFPGFVSW |
| | GACTGCCAAGAAAATGGTGCTGGCT | RDPKSGSVVYVETLDDIFEQWAHSE |
| | TTGCTGGAGCTGGCGCGGCAGGAC | DLQSLLLRVANAVSVKGIYKQMPGC |
| | CACGGTGCTCTGGACTGCTGCGTGG | FNtLRKKLFFKTSASRA-(T2A) |
| | TGGTCATTCTCTCTCACGGCTGTCA | |
| | GGCCAGCCACCTGCAGTTCCCAGG | |
| | GGCTGTCTACGGCACAGATGGATGC | |
| | CCTGTGTCGGTCGAGAAGATTGTGA | |
| | ACATCTTCAATGGGACCAGCTGCCC | |
| | CAGCCTGGGAGGGAAGCCCAAGCT | |
| | CTTTTTCATCCAGGCCTGTGGTGGG | |
| | GAGCAGAAAGACCATGGGTTTGAGG | |
| | TGGCCTCCACTTCCCCTGAAGACGA | |
| | GTCCCCTGGCAGTAACCCCGAGCCA | |
| | GATGCCACCCCGTTCCAGGAAGGTT | |
| | TGAGGACCTTCGACCAGCTGGACGC | |
| | CATATCTAGTTTGCCCACACCCAGT | |
| | GACATCTTTGTGTCCTACTCTACTTT | |
| | CCCAGGTTTTGTTTCCTGGAGGGAC | |
| | CCCAAGAGTGGCTCCTGGTACGTTG | |
| | AGACCCTGGACGACATCTTTGAGCA | |
| | GTGGGCTCACTCTGAAGACCTGCAG | |
| | TCCCTCCTGCTTAGGGTCGCTAATG | |
| | CTGTTTCGGTGAAAGGGATTTATAAA | |
| | CAGATGCCTGGTTGCTTTAAttcCCTC | |
| | CGGAAAAAACTTTTCTTTAAAACATC | |
| | AGCTAGCAGAGCC-(T2A) | |
| Fv-L-iCaspase9 S144A | SEQ ID NO: 112 | SEQ ID NO: 113 |
| N405Q-T2A codon | (Fv-L)- | (Fv-L)- |
| optimized | GTGGACGGGTTTGGAGATGTGGGA | VDGFGDVGALEaLRGNADLAYILSM |
| | GCCCTGGAAgCCCTGCGGGGCAATG | EPCGHCLIINNVNFCRESGLRTRTG |
| | CCGATCTGGCTTACATCCTGTCTATG | SNIDCEKLRRRFSS |
| | GAGCCTTGCGGCCACTGTCTGATCA | LHFMVEVKGDLTAKKMVLALLELAR |
| | TTAACAATGTGAACTTCTGCAGAGAG | QDHGALDCCVVVILSHGCQASHLQ |
| | AGCGGGCTGCGGACCAGAACAGGA | FPGAVYGTDGC |
| | TCCAATATTGACTGTGAAAAGCTGC | PVSVEKIVNIFNGTSCPSLGGKPKLF |
| | GGAGAAGGTTCTCTAGTCTGCACTT | FIQACGGEQKDHGFEVASTSPEDE |
| | TATGGTCGAGGTGAAAGGCGATCTG | SPGSNPEPDA |
| | ACCGCTAAGAAAATGGTGCTGGCCC | TPFQEGLRTFDQLDAISSLPTPSDIF |
| | TGCTGGAACTGGCTCGGCAGGACCA | VSYSTFPGFVSWRDPKSGSVVYVET |
| | TGGGGCACTGGATTGCTGCGTGGTC | LDDIFEQWAH |
| | GTGATCCTGAGTCACGGCTGCCAGG | SEDLQSLLLRVANAVSVKGIYKQMP |
| | CTTCACATCTGCAGTTCCCTGGGGC | GCFqFLRKKLFFKTSASRA-(T2A) |
| | AGTCTATGGAACTGACGGCTGTCCA | |
| | GTCAGCGTGGAGAAGATCGTGAACA | |
| | TCTTCAACGGCACCTCTTGCCCAAG | |
| | TCTGGGCGGGAAGCCCAAACTGTTC | |
| | TTTATTCAGGCCTGTGGAGGCGAGC | |
| | AGAAAGATCACGGCTTCGAAGTGGC | |
| | TAGCACCTCCCCCGAGGACGAATCA | |
| | CCTGGAAGCAACCCTGAGCCAGATG | |
| | CAACCCCCTTCCAGGAAGGCCTGAG | |
| | GACATTTGACCAGCTGGATGCCATC | |
| | TCAAGCCTGCCCACACCTTCTGACA | |
| | TTTTCGTCTCTTACAGTACTTTCCCT | |
| | GGATTTGTGAGCTGGCGCGATCCAA | |
| | AGTCAGGCAGCTGGTACGTGGAGAC | |
| | ACTGGACGATATCTTTGAGCAGTGG | |
| | GCCCATTCTGAAGACCTGCAGAGTC | |
| | TGCTGCTGCGAGTGGCCAATGCTGT | |
| | CTCTGTGAAGGGGATCTACAAACAG | |
| | ATGCCAGGATGCTTCcagTTTCTGAG | |
| | AAAGAAACTGTTCTTTAAGACCTCCG | |
| | CATCTAGGGCC-(T2A) | |
| Fv-iCASP9 S144A | SEQ ID NO: 114 | SEQ ID NO: 115 |
| D330A-T2A | (Fv-L)- | (Fv-L)- |
| | GTCGACGGATTTGGTGATGTCGGTG | VDGFGDVGALEaLRGNADLAYILSM |
| | CTCTTGAGgcTTTGAGGGGAAATGCA | EPCGHCLIINNVNFCRESGLRTRTG |
| | GATTTGGCTTACATCCTGAGCATGG | SNIDCEKLRRRFSSLHFMVEVKGDL |
| | AGCCCTGTGGCCACTGCCTCATTAT | TAKKMVLALLELARQDHGALDCCV |
| | CAACAATGTGAACTTCTGCCGTGAG | VVILSHGCQASHLQFPGAVYGTDG |
| | TCCGGGCTCCGCACCCGCACTGGC | CPVSVEKIVNIFNGTSCPSLGGKPK |
| | TCCAACATCGACTGTGAGAAGTTGC | LFFIQACGGEQKDHGFEVASTSPE |
| | GGCGTCGCTTCTCCTCGCTGCATTT | DESPGSNPEPDATPFQEGLRTFDQ |
| | CATGGTGGAGGTGAAGGGCGACCT | LaAISSLPTPSDIFVSYSTFPGFVSW |
| | GACTGCCAAGAAAATGGTGCTGGCT | RDPKSGSVVYVETLDDIFEQWAHSE |
| | TTGCTGGAGCTGGCGCGGCAGGAC | DLQSLLLRVANAVSVKGIYKQMPGC |
| | CACGGTGCTCTGGACTGCTGCGTGG | FNFLRKKLFFKTSASRA |
| | TGGTCATTCTCTCTCACGGCTGTCA | |
| | GGCCAGCCACCTGCAGTTCCCAGG | |
| | GGCTGTCTACGGCACAGATGGATGC | |
| | CCTGTGTCGGTCGAGAAGATTGTGA | |
| | ACATCTTCAATGGGACCAGCTGCCC | |
| | CAGCCTGGGAGGGAAGCCCAAGCT | |
| | CTTTTTCATCCAGGCCTGTGGTGGG | |
| | GAGCAGAAAGACCATGGGTTTGAGG | |
| | TGGCCTCCACTTCCCCTGAAGACGA | |
| | GTCCCCTGGCAGTAACCCCGAGCCA | |
| | GATGCCACCCCGTTCCAGGAAGGTT | |
| | TGAGGACCTTCGACCAGCTGGcCGC | |
| | CATATCTAGTTTGCCCACACCCAGT | |
| | GACATCTTTGTGTCCTACTCTACTTT | |
| | CCCAGGTTTTGTTTCCTGGAGGGAC | |
| | CCCAAGAGTGGCTCCTGGTACGTTG | |
| | AGACCCTGGACGACATCTTTGAGCA | |
| | GTGGGCTCACTCTGAAGACCTGCAG | |
| | TCCCTCCTGCTTAGGGTCGCTAATG | |
| | CTGTTTCGGTGAAAGGGATTTATAAA | |
| | CAGATGCCTGGTTGCTTTAATTTCCT | |
| | CCGGAAAAAACTTTTCTTTAAAACAT | |
| | CAGCTAGCAGAGCC-(T2A) | |
| Fv-iCASP9 S144D | SEQ ID NO: 116 | SEQ ID NO: 117 |
| D330A-T2A | (Fv-L)- | (Fv-L)- |
| | GTCGACGGATTTGGTGATGTCGGTG | VDGFGDVGALEdLRGNADLAYILSM |
| | CTCTTGAGgacTTGAGGGGAAATGCA | EPCGHCLIINNVNFCRESGLRTRTG |
| | GATTTGGCTTACATCCTGAGCATGG | SNIDCEKLRRRFSSLHFMVEVKGDL |
| | AGCCCTGTGGCCACTGCCTCATTAT | TAKKMVLALLELARQDHGALDCCV |
| | CAACAATGTGAACTTCTGCCGTGAG | VVILSHGCQASHLQFPGAVYGTDG |
| | TCCGGGCTCCGCACCCGCACTGGC | CPVSVEKIVNIFNGTSCPSLGGKPK |
| | TCCAACATCGACTGTGAGAAGTTGC | LFFIQACGGEQKDHGFEVASTSPE |
| | GGCGTCGCTTCTCCTCGCTGCATTT | DESPGSNPEPDATPFQEGLRTFDQ |
| | CATGGTGGAGGTGAAGGGCGACCT | LaAISSLPTPSDIFVSYSTFPGFVSW |
| | GACTGCCAAGAAAATGGTGCTGGCT | RDPKSGSVVYVETLDDIFEQWAHSE |
| | TTGCTGGAGCTGGCGCGGCAGGAC | DLQSLLLRVANAVSVKGIYKQMPGC |
| | CACGGTGCTCTGGACTGCTGCGTGG | FNFLRKKLFFKTSASRA |
| | TGGTCATTCTCTCTCACGGCTGTCA | |
| | GGCCAGCCACCTGCAGTTCCCAGG | |
| | GGCTGTCTACGGCACAGATGGATGC | |
| | CCTGTGTCGGTCGAGAAGATTGTGA | |
| | ACATCTTCAATGGGACCAGCTGCCC | |
| | CAGCCTGGGAGGGAAGCCCAAGCT | |
| | CTTTTTCATCCAGGCCTGTGGTGGG | |
| | GAGCAGAAAGACCATGGGTTTGAGG | |
| | TGGCCTCCACTTCCCCTGAAGACGA | |
| | GTCCCCTGGCAGTAACCCCGAGCCA | |
| | GATGCCACCCCGTTCCAGGAAGGTT | |
| | TGAGGACCTTCGACCAGCTGGcCGC | |
| | CATATCTAGTTTGCCCACACCCAGT | |
| | GACATCTTTGTGTCCTACTCTACTTT | |
| | CCCAGGTTTTGTTTCCTGGAGGGAC | |
| | CCCAAGAGTGGCTCCTGGTACGTTG | |
| | AGACCCTGGACGACATCTTTGAGCA | |
| | GTGGGCTCACTCTGAAGACCTGCAG | |
| | TCCCTCCTGCTTAGGGTCGCTAATG | |
| | CTGTTTCGGTGAAAGGGATTTATAAA | |
| | CAGATGCCTGGTTGCTTTAATTTCCT | |
| | CCGGAAAAAACTTTTCTTTAAAACAT | |
| | CAGCTAGCAGAGCC-(T2A) | |
| Fv-iCASP9 S196A | SEQ ID NO: 118 | SEQ ID NO: 119 |
| D330A-T2A | (Fv-L)- | (Fv-L)- |
| | GTCGACGGATTTGGTGATGTCGGTG | VDGFGDVGALESLRGNADLAYILSM |
| | CTCTTGAGAGTTTGAGGGGAAATGC | EPCGHCLIINNVNFCRESGLRTRTG |
| | AGATTTGGCTTACATCCTGAGCATG | SNIDCEKLRRRFSaLHFMVEVKGDL |
| | GAGCCCTGTGGCCACTGCCTCATTA | TAKKMVLALLELARQDHGALDCCV |
| | TCAACAATGTGAACTTCTGCCGTGA | VVILSHGCQASHLQFPGAVYGTDG |
| | GTCCGGGCTCCGCACCCGCACTGG | CPVSVEKIVNIFNGTSCPSLGGKPK |
| | CTCCAACATCGACTGTGAGAAGTTG | LFFIQACGGEQKDHGFEVASTSPE |
| | CGGCGTCGCTTCTCCgCGCTGCATT | DESPGSNPEPDATPFQEGLRTFDQ |
| | TCATGGTGGAGGTGAAGGGCGACCT | LaAISSLPTPSDIFVSYSTFPGFVSW |
| | GACTGCCAAGAAAATGGTGCTGGCT | RDPKSGSVVYVETLDDIFEQWAHSE |
| | TTGCTGGAGCTGGCGCGGCAGGAC | DLQSLLLRVANAVSVKGIYKQMPGC |
| | CACGGTGCTCTGGACTGCTGCGTGG | FNFLRKKLFFKTSASRA-(T2A) |
| | TGGTCATTCTCTCTCACGGCTGTCA | |
| | GGCCAGCCACCTGCAGTTCCCAGG | |
| | GGCTGTCTACGGCACAGATGGATGC | |
| | CCTGTGTCGGTCGAGAAGATTGTGA | |
| | ACATCTTCAATGGGACCAGCTGCCC | |
| | CAGCCTGGGAGGGAAGCCCAAGCT | |
| | CTTTTTCATCCAGGCCTGTGGTGGG | |
| | GAGCAGAAAGACCATGGGTTTGAGG | |
| | TGGCCTCCACTTCCCCTGAAGACGA | |
| | GTCCCCTGGCAGTAACCCCGAGCCA | |
| | GATGCCACCCCGTTCCAGGAAGGTT | |
| | TGAGGACCTTCGACCAGCTGGcCGC | |
| | CATATCTAGTTTGCCCACACCCAGT | |
| | GACATCTTTGTGTCCTACTCTACTTT | |
| | CCCAGGTTTTGTTTCCTGGAGGGAC | |
| | CCCAAGAGTGGCTCCTGGTACGTTG | |
| | AGACCCTGGACGACATCTTTGAGCA | |
| | GTGGGCTCACTCTGAAGACCTGCAG | |
| | TCCCTCCTGCTTAGGGTCGCTAATG | |
| | CTGTTTCGGTGAAAGGGATTTATAAA | |
| | CAGATGCCTGGTTGCTTTAATTTCCT | |
| | CCGGAAAAAACTTTTCTTTAAAACAT | |
| | CAGCTAGCAGAGCC-(T2A) | |
| Fv-iCASP9 S196D | SEQ ID NO: 120 | SEQ ID NO: 121 |
| D330A-T2A | (Fv-L)- | (Fv-L)- |
| | GTCGACGGATTTGGTGATGTCGGTG | VDGFGDVGALESLRGNADLAYILSM |
| | CTCTTGAGAGTTTGAGGGGAAATGC | EPCGHCLIINNVNFCRESGLRTRTG |
| | AGATTTGGCTTACATCCTGAGCATG | SNIDCEKLRRRFSdLHFMVEVKGDL |
| | GAGCCCTGTGGCCACTGCCTCATTA | TAKKMVLALLELARQDHGALDCCV |
| | TCAACAATGTGAACTTCTGCCGTGA | VVILSHGCQASHLQFPGAVYGTDG |
| | GTCCGGGCTCCGCACCCGCACTGG | CPVSVEKIVNIFNGTSCPSLGGKPK |
| | CTCCAACATCGACTGTGAGAAGTTG | LFFIQACGGEQKDHGFEVASTSPE |
| | CGGCGTCGCTTCTCCgacCTGCATTT | DESPGSNPEPDATPFQEGLRTFDQ |
| | CATGGTGGAGGTGAAGGGCGACCT | LaAISSLPTPSDIFVSYSTFPGFVSW |
| | GACTGCCAAGAAAATGGTGCTGGCT | RDPKSGSVVYVETLDDIFEQWAHSE |
| | TTGCTGGAGCTGGCGCGGCAGGAC | DLQSLLLRVANAVSVKGIYKQMPGC |
| | CACGGTGCTCTGGACTGCTGCGTGG | FNFLRKKLFFKTSASRA-(T2A) |
| | TGGTCATTCTCTCTCACGGCTGTCA | |
| | GGCCAGCCACCTGCAGTTCCCAGG | |
| | GGCTGTCTACGGCACAGATGGATGC | |
| | CCTGTGTCGGTCGAGAAGATTGTGA | |
| | ACATCTTCAATGGGACCAGCTGCCC | |
| | CAGCCTGGGAGGGAAGCCCAAGCT | |
| | CTTTTTCATCCAGGCCTGTGGTGGG | |
| | GAGCAGAAAGACCATGGGTTTGAGG | |
| | TGGCCTCCACTTCCCCTGAAGACGA | |
| | GTCCCCTGGCAGTAACCCCGAGCCA | |
| | GATGCCACCCCGTTCCAGGAAGGTT | |
| | TGAGGACCTTCGACCAGCTGGcCGC | |
| | CATATCTAGTTTGCCCACACCCAGT | |
| | GACATCTTTGTGTCCTACTCTACTTT | |
| | CCCAGGTTTTGTTTCCTGGAGGGAC | |
| | CCCAAGAGTGGCTCCTGGTACGTTG | |
| | AGACCCTGGACGACATCTTTGAGCA | |
| | GTGGGCTCACTCTGAAGACCTGCAG | |
| | TCCCTCCTGCTTAGGGTCGCTAATG | |
| | CTGTTTCGGTGAAAGGGATTTATAAA | |
| | CAGATGCCTGGTTGCTTTAATTTCCT | |
| | CCGGAAAAAACTTTTCTTTAAAACAT | |
| | CAGCTAGCAGAGCC-(T2A) | |
| Fv-L-iCaspase9 T317S | SEQ ID NO: 122 | SEQ ID NO: 123 |
| N405Q-T2A codon | (Fv-L)- | (Fv-L)- |
| optimized | GTGGACGGGTTTGGAGATGTGGGA | VDGFGDVGALESLRGNADLAYILSM |
| | GCCCTGGAATCCCTGCGGGGCAAT | EPCGHCLIINNVNFCRESGLRTRTG |
| | GCCGATCTGGCTTACATCCTGTCTAT | SNIDCEKLRRRFSS |
| | GGAGCCTTGCGGCCACTGTCTGATC | LHFMVEVKGDLTAKKMVLALLELAR |
| | ATTAACAATGTGAACTTCTGCAGAGA | QDHGALDCCVVVILSHGCQASHLQ |
| | GAGCGGGCTGCGGACCAGAACAGG | FPGAVYGTDGC |
| | ATCCAATATTGACTGTGAAAAGCTGC | PVSVEKIVNIFNGTSCPSLGGKPKLF |
| | GGAGAAGGTTCTCTAGTCTGCACTT | FIQACGGEQKDHGFEVASTSPEDE |
| | TATGGTCGAGGTGAAAGGCGATCTG | SPGSNPEPDA |
| | ACCGCTAAGAAAATGGTGCTGGCCC | sPFQEGLRTFDQLDAISSLPTPSDIF |
| | TGCTGGAACTGGCTCGGCAGGACCA | VSYSTFPGFVSWRDPKSGSVVYVET |
| | TGGGGCACTGGATTGCTGCGTGGTC | LDDIFEQWAH |
| | GTGATCCTGAGTCACGGCTGCCAGG | SEDLQSLLLRVANAVSVKGIYKQMP |
| | CTTCACATCTGCAGTTCCCTGGGGC | GCFqFLRKKLFFKTSASRA-(T2A) |
| | AGTCTATGGAACTGACGGCTGTCCA | |
| | GTCAGCGTGGAGAAGATCGTGAACA | |
| | TCTTCAACGGCACCTCTTGCCCAAG | |
| | TCTGGGCGGGAAGCCCAAACTGTTC | |
| | TTTATTCAGGCCTGTGGAGGCGAGC | |
| | AGAAAGATCACGGCTTCGAAGTGGC | |
| | TAGCACCTCCCCCGAGGACGAATCA | |
| | CCTGGAAGCAACCCTGAGCCAGATG | |
| | CAAgCCCCTTCCAGGAAGGCCTGAG | |
| | GACATTTGACCAGCTGGATGCCATC | |
| | TCAAGCCTGCCCACACCTTCTGACA | |
| | TTTTCGTCTCTTACAGTACTTTCCCT | |
| | GGATTTGTGAGCTGGCGCGATCCAA | |
| | AGTCAGGCAGCTGGTACGTGGAGAC | |
| | ACTGGACGATATCTTTGAGCAGTGG | |
| | GCCCATTCTGAAGACCTGCAGAGTC | |
| | TGCTGCTGCGAGTGGCCAATGCTGT | |
| | CTCTGTGAAGGGGATCTACAAACAG | |
| | ATGCCAGGATGCTTCcagTTTCTGAG | |
| | AAAGAAACTGTTCTTTAAGACCTCCG | |
| | CATCTAGGGCC-(T2A) | |
| Fv-L-Caspase9 D330A | SEQ ID NO: 124 | SEQ ID NO: 125 |
| N405Q-T2A | (Fv-L)- | (Fv-L)- |
| | GTCGACGGATTTGGTGATGTCGGTG | VDGFGDVGALESLRGNADLAYILSM |
| | CTCTTGAGAGTTTGAGGGGAAATGC | EPCGHCLIINNVNFCRESGLRTRTG |
| | AGATTTGGCTTACATCCTGAGCATG | SNIDCEKLRRRFSS |
| | GAGCCCTGTGGCCACTGCCTCATTA | LHFMVEVKGDLTAKKMVLALLELAR |
| | TCAACAATGTGAACTTCTGCCGTGA | QDHGALDCCVVVILSHGCQASHLQ |
| | GTCCGGGCTCCGCACCCGCACTGG | FPGAVYGTDGC |
| | CTCCAACATCGACTGTGAGAAGTTG | PVSVEKIVNIFNGTSCPSLGGKPKLF |
| | CGGCGTCGCTTCTCCTCGCTGCATT | FIQACGGEQKDHGFEVASTSPEDE |
| | TCATGGTGGAGGTGAAGGGCGACCT | SPGSNPEPDA |
| | GACTGCCAAGAAAATGGTGCTGGCT | TPFQEGLRTFDQLaAISSLPTPSDIF |
| | TTGCTGGAGCTGGCGCGGCAGGAC | VSYSTFPGFVSWRDPKSGSVVYVET |
| | CACGGTGCTCTGGACTGCTGCGTGG | LDDIFEQWAH |
| | TGGTCATTCTCTCTCACGGCTGTCA | SEDLQSLLLRVANAVSVKGIYKQMP |
| | GGCCAGCCACCTGCAGTTCCCAGG | GCFqFLRKKLFFKTSASRA-(T2A) |
| | GGCTGTCTACGGCACAGATGGATGC | |
| | CCTGTGTCGGTCGAGAAGATTGTGA | |
| | ACATCTTCAATGGGACCAGCTGCCC | |
| | CAGCCTGGGAGGGAAGCCCAAGCT | |
| | CTTTTTCATCCAGGCCTGTGGTGGG | |
| | GAGCAGAAAGACCATGGGTTTGAGG | |
| | TGGCCTCCACTTCCCCTGAAGACGA | |
| | GTCCCCTGGCAGTAACCCCGAGCCA | |
| | GATGCCACCCCGTTCCAGGAAGGTT | |
| | TGAGGACCTTCGACCAGCTGGcCGC | |
| | CATATCTAGTTTGCCCACACCCAGT | |
| | GACATCTTTGTGTCCTACTCTACTTT | |
| | CCCAGGTTTTGTTTCCTGGAGGGAC | |
| | CCCAAGAGTGGCTCCTGGTACGTTG | |
| | AGACCCTGGACGACATCTTTGAGCA | |
| | GTGGGCTCACTCTGAAGACCTGCAG | |
| | TCCCTCCTGCTTAGGGTCGCTAATG | |
| | CTGTTTCGGTGAAAGGGATTTATAAA | |
| | CAGATGCCTGGTTGCTTcagTTTCCT | |
| | CCGGAAAAAACTTTTCTTTAAAACAT | |
| | CAGCTAGCAGAGCC-(T2A) | |
| Fv-iCASP9 | SEQ ID NO: 126 | SEQ ID NO: 127 |
| ATPF316AVPI-T2A | (Fv-L)- | (Fv-L)- |
| | GTCGACGGATTTGGTGATGTCGGTG | VDGFGDVGALESLRGNADLAYILSM |
| | CTCTTGAGAGTTTGAGGGGAAATGC | EPCGHCLIINNVNFCRESGLRTRTG |
| | AGATTTGGCTTACATCCTGAGCATG | SNIDCEKLRRRFSSLHFMVEVKGDL |
| | GAGCCCTGTGGCCACTGCCTCATTA | TAKKMVLALLELARQDHGALDCCV |
| | TCAACAATGTGAACTTCTGCCGTGA | VVILSHGCQASHLQFPGAVYGTDG |
| | GTCCGGGCTCCGCACCCGCACTGG | CPVSVEKIVNIFNGTSCPSLGGKPK |
| | CTCCAACATCGACTGTGAGAAGTTG | LFFIQACGGEQKDHGFEVASTSPE |
| | CGGCGTCGCTTCTCCTCGCTGCATT | DESPGSNPEPDAvPiQEGLRTFDQL |
| | TCATGGTGGAGGTGAAGGGCGACCT | DAISSLPTPSDIFVSYSTFPGFVSW |
| | GACTGCCAAGAAAATGGTGCTGGCT | RDPKSGSVVYVETLDDIFEQWAHSE |
| | TTGCTGGAGCTGGCGCGGCAGGAC | DLQSLLLRVANAVSVKGIYKQMPGC |
| | CACGGTGCTCTGGACTGCTGCGTGG | FNFLRKKLFFKTSASRA-(T2A) |
| | TGGTCATTCTCTCTCACGGCTGTCA | |
| | GGCCAGCCACCTGCAGTTCCCAGG | |
| | GGCTGTCTACGGCACAGATGGATGC | |
| | CCTGTGTCGGTCGAGAAGATTGTGA | |
| | ACATCTTCAATGGGACCAGCTGCCC | |
| | CAGCCTGGGAGGGAAGCCCAAGCT | |
| | CTTTTTCATCCAGGCCTGTGGTGGG | |
| | GAGCAGAAAGACCATGGGTTTGAGG | |
| | TGGCCTCCACTTCCCCTGAAGACGA | |
| | GTCCCCTGGCAGTAACCCCGAGCCA | |
| | GATGCCgtgCCcaTCCAGGAAGGTTT | |
| | GAGGACCTTCGACCAGCTGGACGC | |
| | CATATCTAGTTTGCCCACACCCAGT | |
| | GACATCTTTGTGTCCTACTCTACTTT | |
| | CCCAGGTTTTGTTTCCTGGAGGGAC | |
| | CCCAAGAGTGGCTCCTGGTACGTTG | |
| | AGACCCTGGACGACATCTTTGAGCA | |
| | GTGGGCTCACTCTGAAGACCTGCAG | |
| | TCCCTCCTGCTTAGGGTCGCTAATG | |
| | CTGTTTCGGTGAAAGGGATTTATAAA | |
| | CAGATGCCTGGTTGCTTTAATTTCCT | |
| | CCGGAAAAAACTTTTCTTTAAAACAT | |
| | CAGCTAGCAGAGCC-(T2A) | |
| Fv-iCASP9 isaqt-T2A | SEQ ID NO: 128 | SEQ ID NO: 129 |
| | (Fv-L)- | (Fv-L)- |
| | GTCGACGGATTTGGTGATGTCGGTG | VDGFGDVGALESLRGNADLAYILSM |
| | CTCTTGAGAGTTTGAGGGGAAATGC | EPCGHCLIINNVNFCRESGLRTRTG |
| | AGATTTGGCTTACATCCTGAGCATG | SNIDCEKLRRRFSS |
| | GAGCCCTGTGGCCACTGCCTCATTA | LHFMVEVKGDLTAKKMVLALLELAR |
| | TCAACAATGTGAACTTCTGCCGTGA | QDHGALDCCVVVILSHGCQASHLQ |
| | GTCCGGGCTCCGCACCCGCACTGG | FPGAVYGTDGC |
| | CTCCAACATCGACTGTGAGAAGTTG | PVSVEKIVNIFNGTSCPSLGGKPKLF |
| | CGGCGTCGCTTCTCCTCGCTGCATT | FIQACGGEQKDHGFEVASTSPEDE |
| | TCATGGTGGAGGTGAAGGGCGACCT | SPGSNPEPDA |
| | GACTGCCAAGAAAATGGTGCTGGCT | TPFQEGLRTFDQLDAISSLPTPSDIF |
| | TTGCTGGAGCTGGCGCGGCAGGAC | VSYSTFPGFVSWRDPKSGSVVYVET |
| | CACGGTGCTCTGGACTGCTGCGTGG | LDDIFEQWAH |
| | TGGTCATTCTCTCTCACGGCTGTCA | SEDLQSLLLRVANAVSVKGIYKQMP |
| | GGCCAGCCACCTGCAGTTCCCAGG | isaqtLRKKLFFKTSASRA-(T2A) |
| | GGCTGTCTACGGCACAGATGGATGC | |
| | CCTGTGTCGGTCGAGAAGATTGTGA | |
| | ACATCTTCAATGGGACCAGCTGCCC | |
| | CAGCCTGGGAGGGAAGCCCAAGCT | |
| | CTTTTTCATCCAGGCCTGTGGTGGG | |
| | GAGCAGAAAGACCATGGGTTTGAGG | |
| | TGGCCTCCACTTCCCCTGAAGACGA | |
| | GTCCCCTGGCAGTAACCCCGAGCCA | |
| | GATGCCACCCCGTTCCAGGAAGGTT | |
| | TGAGGACCTTCGACCAGCTGGACGC | |
| | CATATCTAGTTTGCCCACACCCAGT | |
| | GACATCTTTGTGTCCTACTCTACTTT | |
| | CCCAGGTTTTGTTTCCTGGAGGGAC | |
| | CCCAAGAGTGGCTCCTGGTACGTTG | |
| | AGACCCTGGACGACATCTTTGAGCA | |
| | GTGGGCTCACTCTGAAGACCTGCAG | |
| | TCCCTCCTGCTTAGGGTCGCTAATG | |
| | CTGTTTCGGTGAAAGGGATTTATAAA | |
| | CAGATGCCgatatccgcacagacaCTCCG | |
| | GAAAAAACTTTTCTTTAAAACATCAG | |
| | CTAGCAGAGCC-(T2A) | |

[0701] Partial sequence of a plasmid insert coding for a polypeptide that encodes an inducible Caspase-9 polypeptide and a chimeric antigen receptor that binds to CD19, separated by a 2A linker, wherein the two Caspase-9 polypeptide and the chimeric antigen receptor are separated during translation. The example of a chimeric antigen receptor provided herein may be further modified by including costimulatory polypeptides such as, for example, but not limited to, CD28, 4-1BB and OX40. The inducible Caspase-9 polypeptide provided herein may be substituted by an inducible modified Caspase-9 polypeptide, such as, for example, those provided herein.

FKBPv36
SEQ ID NO: 130
ATGCTGGAGGGAGTGCAGGTGGAGACTATTAGCCCCGGAGATGGCAGAACATTCCCCAAA
AGAGGACAGACTTGCGTCGTGCATTATACTGGAATGCTGGAAGACGGCAAGAAGGTGGAC
AGCAGCCGGGACCGAAACAAGCCCTTCAAGTTCATGCTGGGGAAGCAGGAAGTGATCCG
GGGCTGGGAGGAAGGAGTCGCACAGATGTCAGTGGGACAGAGGGCCAAACTGACTATTA
GCCCAGACTACGCTTATGGAGCAACCGGCCACCCCGGGATCATTCCCCCTCATGCTACAC
TGGTCTTCGATGTGGAGCTGCTGAAGCTGGAA
FKBPv36
SEQ ID NO: 131
MLEGVQVETISPGDGRTFPKRGQTCVVHYTGMLEDGKKVDSSRDRNKPFKFMLGKQEVIRGW
EEGVAQMSVGQRAKLTISPDYAYGATGHPGIIPPHATLVFDVELLKLE
Linker
SEQ ID NO: 132
AGCGGAGGAGGATCCGGA
Linker
SEQ ID NO: 133
SGGGSG
Caspase-9
SEQ ID NO: 134
GTGGACGGGTTTGGAGATGTGGGAGCCCTGGAATCCCTGCGGGGCAATGCCGATCTGGC
TTACATCCTGTCTATGGAGCCTTGCGGCCACTGTCTGATCATTAACAATGTGAACTTCTGCA
GAGAGAGCGGGCTGCGGACCAGAACAGGATCCAATATTGACTGTGAAAAGCTGCGGAGAA
GGTTCTCTAGTCTGCACTTTATGGTCGAGGTGAAAGGCGATCTGACCGCTAAGAAAATGGT
GCTGGCCCTGCTGGAACTGGCTCGGCAGGACCATGGGGCACTGGATTGCTGCGTGGTCG
TGATCCTGAGTCACGGCTGCCAGGCTTCACATCTGCAGTTCCCTGGGGCAGTCTATGGAA
CTGACGGCTGTCCAGTCAGCGTGGAGAAGATCGTGAACATCTTCAACGGCACCTCTTGCC
CAAGTCTGGGCGGGAAGCCCAAACTGTTCTTTATTCAGGCCTGTGGAGGCGAGCAGAAAG
ATCACGGCTTCGAAGTGGCTAGCACCTCCCCCGAGGACGAATCACCTGGAAGCAACCCTG
AGCCAGATGCAACCCCCTTCCAGGAAGGCCTGAGGACATTTGACCAGCTGGATGCCATCT
CAAGCCTGCCCACACCTTCTGACATTTTCGTCTCTTACAGTACTTTCCCTGGATTTGTGAGC
TGGCGCGATCCAAAGTCAGGCAGCTGGTACGTGGAGACACTGGACGATATCTTTGAGCAG
TGGGCCCATTCTGAAGACCTGCAGAGTCTGCTGCTGCGAGTGGCCAATGCTGTCTCTGTG
AAGGGGATCTACAAACAGATGCCAGGATGCTTCAACTTTCTGAGAAAGAAACTGTTCTTTAA
GACCTCCGCATCTAGGGCC
Caspase-9
SEQ ID NO: 135
VDGFGDVGALESLRGNADLAYILSMEPCGHCLIINNVNFCRESGLRTRTGSNIDCEKLRRRFSS
LHFMVEVKGDLTAKKMVLALLELARQDHGALDCCVVVILSHGCQASHLQFPGAVYGTDGCPVS
VEKIVNIFNGTSCPSLGGKPKLFFIQACGGEQKDHGFEVASTSPEDESPGSNPEPDATPFQEGL
RTFDQLDAISSLPTPSDIFVSYSTFPGFVSWRDPKSGSVVYVETLDDIFEQWAHSEDLQSLLLRV
ANAVSVKGIYKQMPGCFNFLRKKLFFKTSASRA
Linker
SEQ ID NO: 136
CCGCGG
Linker
SEQ ID NO: 137
PR
T2A
SEQ ID NO: 138
GAAGGCCGAGGGAGCCTGCTGACATGTGGCGATGTGGAGGAAAACCCAGGACCA
T2A
SEQ ID NO: 139
EGRGSLLTCGDVEENPGP
Linker
SEQ ID NO: 140
CCATGG
Linker
SEQ ID NO: 141
PW
Signal peptide
SEQ ID NO: 142
ATGGAGTTTGGACTTTCTTGGTTGTTTTTGGTGGCAATTCTGAAGGGTGTCCAGTGTAGCA
GG
Signal peptide
SEQ ID NO: 143
MEFGLSWLFLVAILKGVQCSR
FMC63 variable light chain (anti-CD19)
SEQ ID NO: 144
GACATCCAGATGACACAGACTACATCCTCCCTGTCTGCCTCTCTGGGAGACAGAGTCACCA
TCAGTTGCAGGGCAAGTCAGGACATTAGTAAATATTTAAATTGGTATCAGCAGAAACCAGAT
GGAACTGTTAAACTCCTGATCTACCATACATCAAGATTACACTCAGGAGTCCCATCAAGGTT
CAGTGGCAGTGGGTCTGGAACAGATTATTCTCTCACCATTAGCAACCTGGAGCAAGAAGAT
ATTGCCACTTACTTTTGCCAACAGGGTAATACGCTTCCGTACACGTTCGGAGGGGGGACTA
AGTTGGAAATAACA
FMC63 variable light chain (anti CD19)
SEQ ID NO: 145
DIQMTQTTSSLSASLGDRVTISCRASQDISKYLNVVYQQKPDGTVKLLIYHTSRLHSGVPSRFSG
SGSGTDYSLTISNLEQEDIATYFCQQGNTLPYTFGGGTKLEIT
Flexible linker
SEQ ID NO: 146
GGCGGAGGAAGCGGAGGTGGGGGC
Flexible linker
SEQ ID NO: 147
GGGSGGGG
FMC63 variable heavy chain (anti-CD19)
SEQ ID NO: 148
GAGGTGAAACTGCAGGAGTCAGGACCTGGCCTGGTGGCGCCCTCACAGAGCCTGTCCGT
CACATGCACTGTCTCAGGGGTCTCATTACCCGACTATGGTGTAAGCTGGATTCGCCAGCCT
CCACGAAAGGGTCTGGAGTGGCTGGGAGTAATATGGGGTAGTGAAACCACATACTATAATT
CAGCTCTCAAATCCAGACTGACCATCATCAAGGACAACTCCAAGAGCCAAGTTTTCTTAAAA
ATGAACAGTCTGCAAACTGATGACACAGCCATTTACTACTGTGCCAAACATTATTACTACGG
TGGTAGCTATGCTATGGACTACTGGGGTCAAGGAACCTCAGTCACCGTCTCCTCA
FMC63 variable heavy chain (anti CD19)
SEQ ID NO: 149
EVKLQESGPGLVAPSQSLSVTCTVSGVSLPDYGVSWIRQPPRKGLEWLGVIWGSETTYYNSAL
KSRLTIIKDNSKSQVFLKMNSLQTDDTAIYYCAKHYYYGGSYAMDYWGQGTSVTVSS
Linker
SEQ ID NO: 150
GGATCC
Linker
SEQ ID NO: 151
GS
CD34 minimal epitope
SEQ ID NO: 152
GAACTTCCTACTCAGGGGACTTTCTCAAACGTTAGCACAAACGTAAGT
CD34 minimal epitope
SEQ ID NO: 153
ELPTQGTFSNVSTNVS
CD8 α stalk domain
SEQ ID NO: 154
CCCGCCCCAAGACCCCCCACACCTGCGCCGACCATTGCTTCTCAACCCCTGAGTTTGAGA
CCCGAGGCCTGCCGGCCAGCTGCCGGCGGGGCCGTGCATACAAGAGGACTCGATTTCGC
TTGCGAC
CD8 α stalk domain
SEQ ID NO: 155
PAPRPPTPAPTIASQPLSLRPEACRPAAGGAVHTRGLDFACD
CD8 α transmembrane domain
SEQ ID NO: 156
ATCTATATCTGGGCACCTCTCGCTGGCACCTGTGGAGTCCTTCTGCTCAGCCTGGTTATTA
CTCTGTACTGTAATCACCGGAATCGCCGCCGCGTTTGTAAGTGTCCCAGG
CD8 α transmembrane domain
SEQ ID NO: 157
IYIWAPLAGTCGVLLLSLVITLYCNHRNRRRVCKCPR
Linker
SEQ ID NO: 158
GTCGAC
Linker
SEQ ID NO: 159
VD
CD3 zeta
SEQ ID NO: 160
AGAGTGAAGTTCAGCAGGAGCGCAGACGCCCCCGCGTACCAGCAGGGCCAGAACCAGCT
CTATAACGAGCTCAATCTAGGACGAAGAGAGGAGTACGATGTTTTGGACAAGAGACGTGG
CCGGGACCCTGAGATGGGGGGAAAGCCGAGAAGGAAGAACCCTCAGGAAGGCCTGTACA
ATGAACTGCAGAAAGATAAGATGGCGGAGGCCTACAGTGAGATTGGGATGAAAGGCGAGC
GCCGGAGGGGCAAGGGGCACGATGGCCTTTACCAGGGTCTCAGTACAGCCACCAAGGAC
ACCTACGACGCCCTTCACATGCAGGCCCTGCCCCCTCGC
CD3 zeta
SEQ ID NO: 161
RVKFSRSADAPAYQQGQNQLYNELNLGRREEYDVLDKRRGRDPEMGGKPRRKNPQEGLYNE
LQKDKMAEAYSEIGMKGERRRGKGHDGLYQGLSTATKDTYDALHMQALPPR

[0702] Provided below is an example of a plasmid insert coding for a chimeric antigen receptor that binds to Her2/Neu. The chimeric antigen receptor may be further modified by including costimulatory polypeptides such as, for example, but not limited to, CD28, OX40, and 4-1BB.

Signal peptide
SEQ ID NO: 162
ATGGAGTTTGGACTTTCTTGGTTGTTTTTGGTGGCAATTCTGAAGGGTGTCCAGTGTAGCA
GG
Signal peptide
SEQ ID NO: 163
MEFGLSWLFLVAILKGVQCSR
FRP5 variable light chain (anti-Her2)
SEQ ID NO: 164
GACATCCAATTGACACAATCACACAAATTTCTCTCAACTTCTGTAGGAGACAGAGTGAGCAT
AACCTGCAAAGCATCCCAGGACGTGTACAATGCTGTGGCTTGGTACCAACAGAAGCCTGG
ACAATCCCCAAAATTGCTGATTTATTCTGCCTCTAGTAGGTACACTGGGGTACCTTCTCGGT
TTACGGGCTCTGGGTCCGGACCAGATTTCACGTTCACAATCAGTTCCGTTCAAGCTGAAGA
CCTCGCTGTTTATTTTTGCCAGCAGCACTTCCGAACCCCTTTTACTTTTGGCTCAGGCACTA
AGTTGGAAATCAAGGCTTTG
FRP5 variable light chain (anti-Her2)
SEQ ID NO: 165
DIQLTQSHKFLSTSVGDRVSITCKASQDVYNAVAVVYQQKPGQSPKWYSASSRYTGVPSRFT
GSGSGPDFTFTISSVQAEDLAVYFCQQHFRTPFTFGSGTKLEIKAL
Flexible linker
SEQ ID NO: 166
GGCGGAGGAAGCGGAGGTGGGGGC
Flexible linker
SEQ ID NO: 167
GGGSGGGG
FRP5 variable heavy chain (anti-Her2/Neu)
SEQ ID NO: 168
GAAGTCCAATTGCAACAGTCAGGCCCCGAATTGAAAAAGCCCGGCGAAACAGTGAAGATA
TCTTGTAAAGCCTCCGGTTACCCTTTTACGAACTATGGAATGAACTGGGTCAAACAAGCCC
CTGGACAGGGATTGAAGTGGATGGGATGGATCAATACATCAACAGGCGAGTCTACCTTCG
CAGATGATTTCAAAGGTCGCTTTGACTTCTCACTGGAGACCAGTGCAAATACCGCCTACCT
TCAGATTAACAATCTTAAAAGCGAGGATATGGCAACCTACTTTTGCGCAAGATGGGAAGTTT
ATCACGGGTACGTGCCATACTGGGGACAAGGAACGACAGTGACAGTTAGTAGC
FRP5 variable heavy chain (anti-Her2/Neu)
SEQ ID NO: 169
EVQLQQSGPELKKPGETVKISCKASGYPFTNYGMNVVVKQAPGQGLKVVMGWINTSTGESTFA
DDFKGRFDFSLETSANTAYLQINNLKSEDMATYFCARWEVYHGYVPYWGQGTTVTVSS
Linker
SEQ ID NO: 170
GGATCC
Linker
SEQ ID NO: 171
GS
CD34 minimal epitope
SEQ ID NO: 172
GAACTTCCTACTCAGGGGACTTTCTCAAACGTTAGCACAAACGTAAGT
CD34 minimal epitope
SEQ ID NO: 173
ELPTQGTFSNVSTNVS
CD8 alpha stalk
SEQ ID NO: 174
CCCGCCCCAAGACCCCCCACACCTGCGCCGACCATTGCTTCTCAACCCCTGAGTTTGAGA
CCCGAGGCCTGCCGGCCAGCTGCCGGCGGGGCCGTGCATACAAGAGGACTCGATTTCGC
TTGCGAC
CD8 alpha stalk
SEQ ID NO: 175
PAPRPPTPAPTIASQPLSLRPEACRPAAGGAVHTRGLDFACD
CD8 alpha transmembrane region
SEQ ID NO: 176
ATCTATATCTGGGCACCTCTCGCTGGCACCTGTGGAGTCCTTCTGCTCAGCCTGGTTATTA
CTCTGTACTGTAATCACCGGAATCGCCGCCGCGTTTGTAAGTGTCCCAGG
CD8 alpha transmembrane region
SEQ ID NO: 177
IYIWAPLAGTCGVLLLSLVITLYCNHRNRRRVCKCPR
Linker
SEQ ID NO: 178
Ctcgag
Linker
SEQ ID NO: 179
LE
CD3 zeta cytoplasmic domain
SEQ ID NO: 180
AGAGTGAAGTTCAGCAGGAGCGCAGACGCCCCCGCGTACCAGCAGGGCCAGAACCAGCT
CTATAACGAGCTCAATCTAGGACGAAGAGAGGAGTACGATGTTTTGGACAAGAGACGTGG
CCGGGACCCTGAGATGGGGGGAAAGCCGAGAAGGAAGAACCCTCAGGAAGGCCTGTACA
ATGAACTGCAGAAAGATAAGATGGCGGAGGCCTACAGTGAGATTGGGATGAAAGGCGAGC
GCCGGAGGGGCAAGGGGCACGATGGCCTTTACCAGGGTCTCAGTACAGCCACCAAGGAC
ACCTACGACGCCCTTCACATGCAGGCCCTGCCCCCTCGC
CD3 zeta cytoplasmic domain
SEQ ID NO: 181
RVKFSRSADAPAYQQGQNQLYNELNLGRREEYDVLDKRRGRDPEMGGKPRRKNPQEGLYNE
LQKDKMAEAYSEIGMKGERRRGKGHDGLYQGLSTATKDTYDALHMQALPPR
Additional sequences
CD28 nt
SEQ ID NO: 182
TTCTGGGTACTGGTTGTAGTCGGTGGCGTACTTGCTTGTTATTCTCTTCTTGTTACCGTAGC
CTTCATTATATTCTGGGTCCGATCAAAGCGCTCAAGACTCCTCCATTCCGATTATATGAACA
TGACACCTCGCCGACCTGGTCCTACACGCAAACATTATCAACCCTACGCACCCCCCCGAG
ACTTCGCTGCTTATCGATCC,
CD28 aa
SEQ ID NO: 183
FWVLVVVGGVLACYSLLVTVAFIIFVVVRSKRSRLLHSDYMNMTPRRPGPTRKHYQPYAPPRDF
AAYRS,
OX40 nt
SEQ ID NO: 184
GTTGCCGCCATCCTGGGCCTGGGCCTGGTGCTGGGGCTGCTGGGCCCCCTGGCCATCCT
GCTGGCCCTGTACCTGCTCCGGGACCAGAGGCTGCCCCCCGATGCCCACAAGCCCCCTG
GGGGAGGCAGTTTCCGGACCCCCATCCAAGAGGAGCAGGCCGACGCCCACTCCACCCTG
GCCAAGATC,
OX40 aa
SEQ ID NO: 185
VAAILGLGLVLGLLGPLAILLALYLLRRDQRLPPDAHKPPGGGSFRTPIQEEQADAHSTLAKI,
4-1BB nt
SEQ ID NO: 186
AGTGTAGTTAAAAGAGGAAGAAAAAAGTTGCTGTATATATTTAAACAACCATTTATGAGACC
AGTGCAAACCACCCAAGAAGAAGACGGATGTTCATGCAGATTCCCAGAAGAAGAAGAAGG
AGGATGTGAATTG,
4-1BB aa
SEQ ID NO: 187
SVVKRGRKKLLYIFKQPFMRPVQTTQEEDGCSCRFPEEEEGGCEL,

### Expression of MyD88/CD40 Chimeric Antigen Receptors and Chimeric Stimulating Molecules

[0703] The following examples discuss the compositions and methods relating to MyD88/CD40 chimeric antigen receptors and chimeric stimulating molecules, as provided in this application. Also included are compositions and methods related to a Caspase-9-based safety switch, and its use in cells that express the MyD88/CD40 chimeric antigen receptors or chimeric stimulating molecules.

### Example 11: Design and Activity of MyD88/CD40 Chimeric Antigen Receptors

### Design of MC-CAR Constructs

[0704] Based on the activation data from inducible MyD88/CD40 experiments, the potential of MC signaling in a CAR molecule in place of conventional endodomains (e.g., CD28 and 4-1BB) was examined. MC (without AP1903-binding FKBPᵥ₃₆ regions) was subcloned into the PSCA.ζ to emulate the position of the CD28 endodomain. Retrovirus was generated for each of the three constructs, transduced human T cells and subsequently measured transduction efficiency demonstrating that PSCA.MC.ζ could be expressed. To confirm that T cells bearing each of these CAR constructs retained their ability to recognize PSCA⁺ tumor cells, 6-hour cytotoxicity assays were performed, which showed lysis of Capan-1 target cells. Therefore, the addition of MC into the cytoplasmic region of a CAR molecule does not affect CAR expression or the recognition of antigen on target cells.

[0705] MC costimulation enhances T cell killing, proliferation and survival in CAR-modified T cells As demonstrated in short-term cytotoxicity assays, each of the three CAR designs showed the capacity to recognize and lyse Capan-1 tumor cells. Cytolytic effector function in effector T cells is mediated by the release of pre-formed granzymes and perforin following tumor recognition, and activation through CD3ζ is sufficient to induce this process without the need for costimulation. First generation CAR T cells (e.g., CARs constructed with only the CD3ζ cytoplasmic region) can lyse tumor cells; however, survival and proliferation is impaired due to lack of costimulation. Hence, the addition of CD28 or 4-1BB co-stimulating domains constructs has significantly improved the survival and proliferative capacity of CAR T cells.

[0706] To examine whether MC can similarly provide costimulating signals affecting survival and proliferation, coculture assays were performed with PSCA⁺ Capan-1 tumor cells under high tumor: T cell ratios (1:1, 1:5, 1:10 T cell to tumor cell). When T cell and tumor cell numbers were equal (1:1), there was efficient killing of Capan-1-GFP cells from all three constructs compared to non-transduced control T cells. However, when the CAR T cells were challenged with high numbers of tumor cells (1:10), there was a significant reduction of Capan-1-GFP tumor cells only when the CAR molecule contained either MC or CD28.

[0707] To further examine the mechanism of costimulation by these two CARs cell viability and proliferation was assayed. PSCA CARs containing MC or CD28 showed improved survival compared to non-transduced T cells and the CD3ζ only CAR, and T cell proliferation by PSCA.MC.ζ and PSCA.28.ζ was significantly enhanced. As other groups have shown that CARs that contain co-stimulating signaling regions produce IL-2, a key survival and growth molecule for T cells (4), ELISAs were performed on supernatants from CAR T cells challenged with Capan-1 tumor cells. Although PSCA.28.ζ produced high levels of IL-2, PSCA.MC.ζ signaling also produced significant levels of IL-2, which likely contributes to the observed T cell survival and expansion in these assays. Additionally, IL-6 production by CAR-modified T cells was examined, as IL-6 has been implicated as a key cytokine in the potency and efficacy of CAR-modified T cells (15). In contrast to IL-2, PSCA.MC.ζ produced higher levels of IL-6 compared to PSCA.28. ζ, consistent with the observations that iMC activation in primary T cells induces IL-6. Together, these data suggest that co-stimulation through MC produces similar effects to that of CD28, whereby following tumor cell recognition, CAR-modified T cells produce IL-2 and IL-6, which enhance T cell survival

[0708] Immunotherapy using CAR-modified T cells holds great promise for the treatment of a variety of malignancies. While CARs were first designed with a single signaling domain (e.g., CD3ζ, (16-19) clinical trials evaluating the feasibility of CAR immunotherapy showed limited clinical benefit. (1,2,20,21) This has been primarily attributed to the incomplete activation of T cells following tumor recognition, which leads to limited persistence and expansion in vivo. (22) To address this deficiency, CARs have been engineered to include another stimulating domain, often derived from the cytoplasmic portion of T cell costimulating molecules including CD28, 4-1BB, OX40, ICOS and DAP10, (4, 23-30) which allow CAR T cells to receive appropriate costimulation upon engagement of the target antigen. Indeed, clinical trials conducted with anti-CD19 CARs bearing CD28 or 4-1BB signaling domains for the treatment of refractory acute lymphoblastic leukemia (ALL) have demonstrated impressive T cell persistence, expansion and serial tumor killing following adoptive transfer. (6-8)

[0709] CD28 costimulation provides a clear clinical advantage for the treatment of CD19⁺lymphomas. Savoldo and colleagues conducted a CAR-T cell clinical trial comparing first (CD19. ζ) and second generation CARs (CD19.28. ζ) and found that CD28 enhanced T cell persistence and expansion following adoptive transfer.31 One of the principal functions of second generation CARs is the ability to produce IL-2 that supports T cell survival and growth through activation of the NFAT transcription factor by CD3ζ (signal 1), and NF-κB (signal 2) by CD28 or 4-1BB.3ζ This suggested other molecules that similarly activated NF-κB might be paired with the CD3ζ chain within a CAR molecule. Our approach has employed a T cell costimulating molecule that was originally developed as an adjuvant for a dendritic cell (DC) vaccine. (12,33) For full activation or licensing of DCs, TLR signaling is usually involved in the upregulation of the TNF family member, CD40, which interacts with CD40L on antigen-primed CD4⁺T cells. Because iMC was a potent activator of NF-κB in DCs, transduction of T cells with CARs that incorporated MyD88 and CD40 might provide the required costimulation (signal 2) to T cells, and enhance their survival and proliferation.

[0710] A set of experiments was performed to examine whether MyD88, CD40 or both components were required for optimum T cell stimulation using the iMC molecule. Remarkably, it was found that neither MyD88 nor CD40 could sufficiently induce T cell activation, as measured by cytokine production (IL-2 and IL-6), but when combined as a single fusion protein, could induce potent T cell activation. A PSCA CAR incorporating MC was constructed and its function was subsequently compared against a first (PSCA.ζ) and second generation (PSCA.28. ζ) CAR. Here, it was found that MC enhanced survival and proliferation of CAR T cells to a comparable level as the CD28 endodomain, suggesting that costimulation was sufficient. While PSCA.MC.ζ CAR-transduced T cells produced lower levels of IL-2 than PSCA.28. ζ, the secreted levels were significantly higher than non-transduced T cells and T cells transduced with the PSCA.ζ CAR. On the other hand, PSCA.MC.ζ CAR-transduced T cells secreted significantly higher levels of IL-6, an important cytokine associated with T cell activation, than PSCA.28.ζ transduced T cells, indicating that MC conferred unique properties to CAR function that may translate to improved tumor cell killing in vivo. These experiments indicate that MC can activate NF-κB (signal 2) following antigen recognition by the extracellular CAR domain.

### Design and Functional Validation of MC-CAR.

[0711] Three PSCA CAR constructs were designed incorporating only CD3ζ, or with CD28 or MC endodomains. Transduction efficiency (percentage) was measured by anti-CAR-APC (recognizing the IgG1 CH2CH3 domain). C) Flow cytometry analysis demonstrating high transduction efficiency of T cells with PSCA.MC.ζ CAR. D) Analysis of specific lysis of PSCA⁺ Capan-1 tumor cells by CAR-modified T cells in a 6-hour LDH release assay at a ratio of 1:1 T cells to tumor cells.

[0712] MC-CAR modified T cells kill Capan-1 tumor cells in long-term coculture assays. Flow cytometric analysis of CAR-modified and non-transduced T cells cultured with Capan-1-GFP tumor cells after 7 days in culture at a 1:1 ratio. Quantitation of viable GFP⁺ cells by flow cytometry in coculture assays at a 1:1 and 1:10 T cell to tumor cell ratio.

[0713] MC and CD28 costimulation enhance T cell survival, proliferation and cytokine production. T cells isolated from 1:10 T cell to tumor cell coculture assays were assayed for cell viability and cell number to assess survival and proliferation in response to tumor cell exposure. Supernatants from coculture assays were subsequently measured for IL-2 and IL-6 production by ELISA.

[0714] Design of inducible costimulating molecules and effect on T cell activation. Four vectors were designed incorporating FKBPv36 AP1903-binding domains (Fv′.Fv) alone, or with MyD88, CD40 or the MyD88/CD40 fusion protein. Transduction efficiency of primary activated T cells using CD3⁺CD19⁺ flow cytometric analysis. Analysis of IFN-γ production of modified T cells following activation with and without 10 nM AP1903. Analysis of IL-6 production of modified T cells following activation with and without 10 nM AP1903.

[0715] Apart from survival and growth advantages, MC-induced costimulation may also provide additional functions to CAR-modified T cells. Medzhitov and colleagues recently demonstrated that MyD88 signaling was critical for both Th1 and Th17 responses and that it acted via IL-1 to render CD4⁺ T cells refractory to regulatory T cell (Treg)-driven inhibition (34). Experiments with iMC show that IL-1α and β are secreted following AP1903 activation. In addition, Martin et al demonstrated that CD40 signaling in CD8⁺ T cells via Ras, PI3K and protein kinase C, result in NF-κB-dependent induction of cytotoxic mediators granzyme and perforin that lyse CD4⁺CD25⁺ Treg cells (35). Thus, MyD88 and CD40 co-activation may render CAR-T cells resistant to the immunosuppressive effects of Treg cells, a function that could be critically important in the treatment of solid tumors and other types of cancers.

[0716] In summary, MC can be incorporated into a CAR molecule and primary T cells transduced with retrovirus can express PSCA.MC.ζ without overt toxicity or CAR stability issues. Further, MC appears to provide similar costimulation to that of CD28, where transduced T cells show improved survival, proliferation and tumor killing compared to T cells transduced with a first generation CAR.

### Example 12: References

[0717] The following references are cited in, or provide additional information that may be relevant, including, for example, in Example 11.
[0718] 1. Till B G, Jensen M C, Wang J, et al: CD20-specific adoptive immunotherapy for lymphoma using a chimeric antigen receptor with both CD28 and 4-1BB domains: pilot clinical trial results. Blood 119:3940-50, 2012.
[0719] 2 Pule M A, Savoldo B, Myers G D, et al: Virus-specific T cells engineered to coexpress tumor-specific receptors: persistence and antitumor activity in individuals with neuroblastoma. Nat Med 14:1264-70, 2008.
[0720] 3. Kershaw M H, Westwood J A, Parker L L, et al: A phase 1 study on adoptive immunotherapy using gene-modified T cells for ovarian cancer. Clin Cancer Res 12:6106-15, 2006.
[0721] 4. Carpenito C, Milone M C, Hassan R, et al: Control of large, established tumor xenografts with genetically retargeted human T cells containing CD28 and CD137 domains. Proc Natl Acad Sci USA 106:3360-5, 2009.
[0722] 5. Song D G, Ye Q, Poussin M, et al: CD27 costimulation augments the survival and antitumor activity of redirected human T cells in vivo. Blood 119:696-706, 2012.
[0723] 6. Kalos M, Levine B L, Porter D L, et al: T cells with chimeric antigen receptors have potent antitumor effects and can establish memory in patients with advanced leukemia. Sci Transl Med 3: 95ra73, 2011.
[0724] 7. Porter D L, Levine B L, Kalos M, et al: Chimeric antigen receptor-modified T cells in chronic lymphoid leukemia. N Engl J Med 365:725-33, 2011.
[0725] 8. Brentjens R J, Davila M L, Riviere I, et al: CD19-targeted T cells rapidly induce molecular remissions in adults with chemotherapy-refractory acute lymphoblastic leukemia. Sci Transl Med 5: 177ra38, 2013.
[0726] 9. Pule M A, Straathof K C, Dotti G, et al: A chimeric T cell antigen receptor that augments cytokine release and supports clonal expansion of primary human T cells. Mol Ther 12:933-41, 2005.
[0727] 10. Finney H M, Akbar A N, Lawson A D: Activation of resting human primary T cells with chimeric receptors: costimulation from CD28, inducible costimulator, CD134, and CD137 in series with signals from the TCR zeta chain. J Immunol 172:104-13, 2004.
[0728] 11. Guedan S, Chen X, Madar A, et al: ICOS-based chimeric antigen receptors program bipolar TH17/TH1 cells. Blood, 2014.
[0729] 12. Narayanan P, Lapteva N, Seethammagari M, et al: A composite MyD88/CD40 switch synergistically activates mouse and human dendritic cells for enhanced antitumor efficacy. J Clin Invest 121:1524-34, 2011.
[0730] 13. Anurathapan U, Chan R C, Hindi H F, et al: Kinetics of tumor destruction by chimeric antigen receptor-modified T cells. Mol Ther 22:623-33, 2014.
[0731] 14. Craddock J A, Lu A, Bear A, et al: Enhanced tumor trafficking of GD2 chimeric antigen receptor T cells by expression of the chemokine receptor CCR2b. J Immunother 33:780-8, 2010.
[0732] 15. Lee D W, Gardner R, Porter D L, et al: Current concepts in the diagnosis and management of cytokine release syndrome. Blood 124:188-95, 2014.
[0733] 16. Becker M L, Near R, Mudgett-Hunter M, et al: Expression of a hybrid immunoglobulin-T cell receptor protein in transgenic mice. Cell 58:911-21, 1989.
[0734] 17. Goverman J, Gomez S M, Segesman K D, et al: Chimeric immunoglobulin-T cell receptor proteins form functional receptors: implications for T cell receptor complex formation and activation. Cell 60:929-39, 1990.
[0735] 18. Gross G, Waks T, Eshhar Z: Expression of immunoglobulin-T-cell receptor chimeric molecules as functional receptors with antibody-type specificity. Proc Natl Acad Sci U SA 86:10024-8, 1989.
[0736] 19. Kuwana Y, Asakura Y, Utsunomiya N, et al: Expression of chimeric receptor composed of immunoglobulin-derived V regions and T-cell receptor-derived C regions. Biochem Biophys Res Commun 149:960-8, 1987.
[0737] 20. Jensen M C, Popplewell L, Cooper L J, et al: Antitransgene rejection responses contribute to attenuated persistence of adoptively transferred CD20/CD19-specific chimeric antigen receptor redirected T cells in humans. Biol Blood Marrow Transplant 16:1245-56, 2010.
[0738] 21. Park J R, Digiusto D L, Slovak M, et al: Adoptive transfer of chimeric antigen receptor re-directed cytolytic T lymphocyte clones in patients with neuroblastoma. Mol Ther 15:825-33, 2007.
[0739] 22. Ramos C A, Dotti G: Chimeric antigen receptor (CAR)-engineered lymphocytes for cancer therapy. Expert Opin Biol Ther 11:855-73, 2011.
[0740] 23. Finney H M, Lawson A D, Bebbington C R, et al: Chimeric receptors providing both primary and costimulatory signaling in T cells from a single gene product. J Immunol 161:2791-7, 1998.
[0741] 24 Hombach A, Wieczarkowiecz A, Marquardt T, et al: Tumor-specific T cell activation by recombinant immunoreceptors: CD3 zeta signaling and CD28 costimulation are simultaneously required for efficient IL-2 secretion and can be integrated into one combined CD28/CD3 zeta signaling receptor molecule. J Immunol 167:6123-31, 2001.
[0742] 25. Maher J, Brentjens R J, Gunset G, et al: Human T-lymphocyte cytotoxicity and proliferation directed by a single chimeric TCRzeta/CD28 receptor. Nat Biotechnol 20:70-5, 2002.
[0743] 26 Imai C, Mihara K, Andreansky M, et al: Chimeric receptors with 4-1BB signaling capacity provoke potent cytotoxicity against acute lymphoblastic leukemia. Leukemia 18:676-84, 2004.
[0744] 27. Wang J, Jensen M, Lin Y, et al: Optimizing adoptive polyclonal T cell immunotherapy of lymphomas, using a chimeric T cell receptor possessing CD28 and CD137 costimulatory domains. Hum Gene Ther 18:712-25, 2007.
[0745] 28. Zhao Y, Wang Q J, Yang S, et al: A herceptin-based chimeric antigen receptor with modified signaling domains leads to enhanced survival of transduced T lymphocytes and antitumor activity. J Immunol 183:5563-74, 2009.
[0746] 29. Milone M C, Fish J D, Carpenito C, et al: Chimeric receptors containing CD137 signal transduction domains mediate enhanced survival of T cells and increased antileukemic efficacy in vivo. Mol Ther 17:1453-64, 2009.
[0747] 30. Yvon E, Del Vecchio M, Savoldo B, et al: Immunotherapy of metastatic melanoma using genetically engineered GD2-specific T cells. Clin Cancer Res 15:5852-60, 2009.
[0748] 31 Savoldo B, Ramos C A, Liu E, et al: CD28 costimulation improves expansion and persistence of chimeric antigen receptor-modified T cells in lymphoma patients. J Clin Invest 121:1822-6, 2011.
[0749] 32. Kalinski P, Hilkens C M, Wierenga E A, et al: T-cell priming by type-1 and type-2 polarized dendritic cells: the concept of a third signal. Immunol Today 20:561-7, 1999.
[0750] 33. Kemnade J O, Seethammagari M, Narayanan P, et al: Off-the-shelf Adenoviral-mediated Immunotherapy via Bicistronic Expression of Tumor Antigen and iMyD88/CD40 Adjuvant. Mol Ther, 2012.
[0751] 34 Schenten D, Nish S A, Yu S, et al: Signaling through the adaptor molecule MyD88 in CD4⁺T cells is required to overcome suppression by regulatory T cells. Immunity 40:78-90, 2014.
[0752] 35. Martin S, Pahari S, Sudan R, et al: CD40 signaling in CD8⁺CD40⁺T cells turns on contra-T regulatory cell functions. J Immunol 184:5510-8, 2010

### Example 13: MC Costimulation Enhances Function and Proliferation of CD19 CARs

[0753] Experiments similar to those discussed herein, are provided, using an antigen recognition moiety that recognizes the CD19 antigen. It is understood that the vectors provided herein may be modified to construct a MyD88/CD40 CAR construct that targets CD19⁺tumor cells, which also incorporates an inducible Caspase-9 safety switch.

[0754] To examine whether MC costimulation functioned in CARs targeting other antigens, T cells were modified with either CD19.3 or with CD19.MC.ζ. The cytotoxicity, activation and survival against CD19+ Burkitt's lymphoma cell lines (Raji and Daudi) of the modified cells were assayed. In coculture assays, T cells transduced with either CAR showed killing of CD19⁺Raji cells at an effector to target ratio as low as 1:1. However, analysis of cytokine production from co-culture assays showed that CD19.MC.ζ transduced T cells produced higher levels of IL-2 and IL-6 compared to CD19.2, which is consistent with the costimulatory effects observed with iMC and PSCA CARs containing the MC signaling domain. Further, T cells transduced with CD19.MC.ζ showed enhanced proliferation following activation by Raji tumor cells. These data support earlier experiments demonstrating that MC signaling in CAR molecules improves T cell activation, survival and proliferation following ligation to a target antigen expressed on tumor cells.

pBP0526-SFG.iCasp9wt.2A.CD19scFv.CD34e.CD8stm.MC.zeta
FKBPv36
SEQ ID NO: 321
ATGCTGGAGGGAGTGCAGGTGGAGACTATTAGCCCCGGAGATGGCAGAACATTCCCCAAA
AGAGGACAGACTTGCGTCGTGCATTATACTGGAATGCTGGAAGACGGCAAGAAGGTGGAC
AGCAGCCGGGACCGAAACAAGCCCTTCAAGTTCATGCTGGGGAAGCAGGAAGTGATCCG
GGGCTGGGAGGAAGGAGTCGCACAGATGTCAGTGGGACAGAGGGCCAAACTGACTATTA
GCCCAGACTACGCTTATGGAGCAACCGGCCACCCCGGGATCATTCCCCCTCATGCTACAC
TGGTCTTCGATGTGGAGCTGCTGAAGCTGGAA
FKBPv36
SEQ ID NO: 322
MLEGVQVETISPGDGRTFPKRGQTCVVHYTGMLEDGKKVDSSRDRNKPFKFMLGKQEVIRGW
EEGVAQMSVGQRAKLTISPDYAYGATGHPGIIPPHATLVFDVELLKLE
Linker
SEQ ID NO: 323
AGCGGAGGAGGATCCGGA
Linker
SEQ ID NO: 324
SGGGSG
Caspase-9
SEQ ID NO: 325
GTGGACGGGTTTGGAGATGTGGGAGCCCTGGAATCCCTGCGGGGCAATGCCGATCTGGC
TTACATCCTGTCTATGGAGCCTTGCGGCCACTGTCTGATCATTAACAATGTGAACTTCTGCA
GAGAGAGCGGGCTGCGGACCAGAACAGGATCCAATATTGACTGTGAAAAGCTGCGGAGAA
GGTTCTCTAGTCTGCACTTTATGGTCGAGGTGAAAGGCGATCTGACCGCTAAGAAAATGGT
GCTGGCCCTGCTGGAACTGGCTCGGCAGGACCATGGGGCACTGGATTGCTGCGTGGTCG
TGATCCTGAGTCACGGCTGCCAGGCTTCACATCTGCAGTTCCCTGGGGCAGTCTATGGAA
CTGACGGCTGTCCAGTCAGCGTGGAGAAGATCGTGAACATCTTCAACGGCACCTCTTGCC
CAAGTCTGGGCGGGAAGCCCAAACTGTTCTTTATTCAGGCCTGTGGAGGCGAGCAGAAAG
ATCACGGCTTCGAAGTGGCTAGCACCTCCCCCGAGGACGAATCACCTGGAAGCAACCCTG
AGCCAGATGCAACCCCCTTCCAGGAAGGCCTGAGGACATTTGACCAGCTGGATGCCATCT
CAAGCCTGCCCACACCTTCTGACATTTTCGTCTCTTACAGTACTTTCCCTGGATTTGTGAGC
TGGCGCGATCCAAAGTCAGGCAGCTGGTACGTGGAGACACTGGACGATATCTTTGAGCAG
TGGGCCCATTCTGAAGACCTGCAGAGTCTGCTGCTGCGAGTGGCCAATGCTGTCTCTGTG
AAGGGGATCTACAAACAGATGCCAGGATGCTTCAACTTTCTGAGAAAGAAACTGTTCTTTAA
GACCTCCGCATCTAGGGCC
Caspase-9
SEQ ID NO: 326
VDGFGDVGALESLRGNADLAYILSMEPCGHCLIINNVNFCRESGLRTRTGSNIDCEKLRRRFSS
LHFMVEVKGDLTAKKMVLALLELARQDHGALDCCVVVILSHGCQASHLQFPGAVYGTDGCPVS
VEKIVNIFNGTSCPSLGGKPKLFFIQACGGEQKDHGFEVASTSPEDESPGSNPEPDATPFQEGL
RTFDQLDAISSLPTPSDIFVSYSTFPGFVSWRDPKSGSVVYVETLDDIFEQWAHSEDLQSLLLRV
ANAVSVKGIYKQMPGCFNFLRKKLFFKTSASRA
Linker
SEQ ID NO: 327
CCGCGG
Linker
SEQ ID NO: 328
PR
T2A
SEQ ID NO: 329
GAAGGCCGAGGGAGCCTGCTGACATGTGGCGATGTGGAGGAAAACCCAGGACCA
T2A
SEQ ID NO: 330
EGRGSLLTCGDVEENPGP
Linker
SEQ ID NO: 331
CCATGG
Linker
SEQ ID NO: 332
PW
Signal peptide
SEQ ID NO: 333
ATGGAGTTTGGACTTTCTTGGTTGTTTTTGGTGGCAATTCTGAAGGGTGTCCAGTGTAGCA
GG
Signal peptide
SEQ ID NO: 334
MEFGLSWLFLVAILKGVQCSR
FMC63 variable light chain (anti-CD19)
SEQ ID NO: 335
GACATCCAGATGACACAGACTACATCCTCCCTGTCTGCCTCTCTGGGAGACAGAGTCACCA
TCAGTTGCAGGGCAAGTCAGGACATTAGTAAATATTTAAATTGGTATCAGCAGAAACCAGAT
GGAACTGTTAAACTCCTGATCTACCATACATCAAGATTACACTCAGGAGTCCCATCAAGGTT
CAGTGGCAGTGGGTCTGGAACAGATTATTCTCTCACCATTAGCAACCTGGAGCAAGAAGAT
ATTGCCACTTACTTTTGCCAACAGGGTAATACGCTTCCGTACACGTTCGGAGGGGGGACTA
AGTTGGAAATAACA
FMC63 variable light chain (anti CD19)
SEQ ID NO: 336
DIQMTQTTSSLSASLGDRVTISCRASQDISKYLNVVYQQKPDGTVKLLIYHTSRLHSGVPSRFSG
SGSGTDYSLTISNLEQEDIATYFCQQGNTLPYTFGGGTKLEIT
Flexible linker
SEQ ID NO: 337
GGCGGAGGAAGCGGAGGTGGGGGC
Flexible linker
SEQ ID NO: 338
GGGSGGGG
FMC63 variable heavy chain (anti-CD19)
SEQ ID NO: 339
GAGGTGAAACTGCAGGAGTCAGGACCTGGCCTGGTGGCGCCCTCACAGAGCCTGTCCGT
CACATGCACTGTCTCAGGGGTCTCATTACCCGACTATGGTGTAAGCTGGATTCGCCAGCCT
CCACGAAAGGGTCTGGAGTGGCTGGGAGTAATATGGGGTAGTGAAACCACATACTATAATT
CAGCTCTCAAATCCAGACTGACCATCATCAAGGACAACTCCAAGAGCCAAGTTTTCTTAAAA
ATGAACAGTCTGCAAACTGATGACACAGCCATTTACTACTGTGCCAAACATTATTACTACGG
TGGTAGCTATGCTATGGACTACTGGGGTCAAGGAACCTCAGTCACCGTCTCCTCA
FMC63 variable heavy chain (anti CD19)
SEQ ID NO: 340
EVKLQESGPGLVAPSQSLSVTCTVSGVSLPDYGVSWIRQPPRKGLEWLGVIWGSETTYYNSAL
KSRLTIIKDNSKSQVFLKMNSLQTDDTAIYYCAKHYYYGGSYAMDYWGQGTSVTVSS
Linker
SEQ ID NO: 341
GGATCC
Linker
SEQ ID NO: 342
GS
CD34 minimal epitope
SEQ ID NO: 343
GAACTTCCTACTCAGGGGACTTTCTCAAACGTTAGCACAAACGTAAGT
CD34 minimal epitope
SEQ ID NO: 344
ELPTQGTFSNVSTNVS
CD8 α stalk domain
SEQ ID NO: 345
CCCGCCCCAAGACCCCCCACACCTGCGCCGACCATTGCTTCTCAACCCCTGAGTTTGAGA
CCCGAGGCCTGCCGGCCAGCTGCCGGCGGGGCCGTGCATACAAGAGGACTCGATTTCGC
TTGCGAC
CD8 α stalk domain
SEQ ID NO: 346
PAPRPPTPAPTIASQPLSLRPEACRPAAGGAVHTRGLDFACD
CD8 α transmembrane domain
SEQ ID NO: 347
ATCTATATCTGGGCACCTCTCGCTGGCACCTGTGGAGTCCTTCTGCTCAGCCTGGTTATTA
CTCTGTACTGTAATCACCGGAATCGCCGCCGCGTTTGTAAGTGTCCCAGG
CD8 α transmembrane domain
SEQ ID NO: 348
IYIWAPLAGTCGVLLLSLVITLYCNHRNRRRVCKCPR
Linker
SEQ ID NO: 349
GTCGAC
Linker
SEQ ID NO: 350
VD
Truncated MyD88 lacking the TIR domain
SEQ ID NO: 351
ATGGCCGCTGGGGGCCCAGGCGCCGGATCAGCTGCTCCCGTATCTTCTACTTCTTCTTTG
CCGCTGGCTGCTCTGAACATGCGCGTGAGAAGACGCCTCTCCCTGTTCCTTAACGTTCGC
ACACAAGTCGCTGCCGATTGGACCGCCCTTGCCGAAGAAATGGACTTTGAATACCTGGAA
ATTAGACAACTTGAAACACAGGCCGACCCCACTGGCAGACTCCTGGACGCATGGCAGGGA
AGACCTGGTGCAAGCGTTGGACGGCTCCTGGATCTCCTGACAAAACTGGGACGCGACGAC
GTACTGCTTGAACTCGGACCTAGCATTGAAGAAGACTGCCAAAAATATATCCTGAAACAAC
AACAAGAAGAAGCCGAAAAACCTCTCCAAGTCGCAGCAGTGGACTCATCAGTACCCCGAA
CAGCTGAGCTTGCTGGGATTACTACACTCGACGACCCACTCGGACATATGCCTGAAAGATT
CGACGCTTTCATTTGCTATTGCCCCTCTGACATA
Truncated MyD88 lacking the TIR domain
SEQ ID NO: 352
MAAGGPGAGSAAPVSSTSSLPLAALNMRVRRRLSLFLNVRTQVAADVVTALAEEMDFEYLEIRQ
LETQADPTGRLLDAWQGRPGASVGRLLDLLTKLGRDDVLLELGPSIEEDCQKYILKQQQEEAE
KPLQVAAVDSSVPRTAELAGITTLDDPLGHMPERFDAFICYCPSDI
CD40 without the extracellular domain
SEQ ID NO: 353
AAGAAAGTTGCAAAGAAACCCACAAATAAAGCCCCACACCCTAAACAGGAACCCCAAGAAA
TCAATTTCCCAGATGATCTCCCTGGATCTAATACTGCCGCCCCGGTCCAAGAAACCCTGCA
TGGTTGCCAGCCTGTCACCCAAGAGGACGGAAAAGAATCACGGATTAGCGTACAAGAGAG
ACAA
CD40 without the extra cellular domain
SEQ ID NO: 354
KKVAKKPTNKAPHPKQEPQEINFPDDLPGSNTAAPVQETLHGCQPVTQEDGKESRISVQERQ
CD3 zeta
SEQ ID NO: 355
AGAGTGAAGTTCAGCAGGAGCGCAGACGCCCCCGCGTACCAGCAGGGCCAGAACCAGCT
CTATAACGAGCTCAATCTAGGACGAAGAGAGGAGTACGATGTTTTGGACAAGAGACGTGG
CCGGGACCCTGAGATGGGGGGAAAGCCGAGAAGGAAGAACCCTCAGGAAGGCCTGTACA
ATGAACTGCAGAAAGATAAGATGGCGGAGGCCTACAGTGAGATTGGGATGAAAGGCGAGC
GCCGGAGGGGCAAGGGGCACGATGGCCTTTACCAGGGTCTCAGTACAGCCACCAAGGAC
ACCTACGACGCCCTTCACATGCAGGCCCTGCCCCCTCGC
CD3 zeta
SEQ ID NO: 356
RVKFSRSADAPAYQQGQNQLYNELNLGRREEYDVLDKRRGRDPEMGGKPRRKNPQEGLYNE
LQKDKMAEAYSEIGMKGERRRGKGHDGLYQGLSTATKDTYDALHMQALPPR

### Example 14: Cytokine Production of T Cells Co-Expressing a MyD88/CD40 Chimeric Antigen Receptor and Inducible Caspase-9 Polypeptide

[0755] Various chimeric antigen receptor constructs were created to compare cytokine production of transduced T cells after exposure to antigen. The chimeric antigen receptor constructs all had an antigen recognition region that bound to CD19. It is understood that the vectors provided herein may be modified to construct a CAR construct that also incorporates an inducible Caspase-9 safety switch. It is further understood that the CAR construct may further comprise an FRB domain.

### Example 15: An Example of a MyD88/CD40 CAR Construct for Targeting Her2⁺ Tumor Cells

[0756] It is understood that the vectors provided herein may be modified to construct a MyD88/CD40 CAR construct that targets Her2⁺ tumor cells, which also incorporates an inducible Caspase-9 safety switch. It is further understood that the CAR construct may further comprise an FRB domain.

SFG-Her2scFv.CD34e.CD8stm.MC.zeta sequence
Signal peptide
SEQ ID NO: 357
ATGGAGTTTGGACTTTCTTGGTTGTTTTTGGTGGCAATTCTGAAGGGTGTCCAGTGTAGCA
GG
Signal peptide
SEQ ID NO: 358
MEFGLSWLFLVAILKGVQCSR
FRP5 variable light chain (anti-Her2)
SEQ ID NO: 359
GACATCCAATTGACACAATCACACAAATTTCTCTCAACTTCTGTAGGAGACAGAGTGAGCAT
AACCTGCAAAGCATCCCAGGACGTGTACAATGCTGTGGCTTGGTACCAACAGAAGCCTGG
ACAATCCCCAAAATTGCTGATTTATTCTGCCTCTAGTAGGTACACTGGGGTACCTTCTCGGT
TTACGGGCTCTGGGTCCGGACCAGATTTCACGTTCACAATCAGTTCCGTTCAAGCTGAAGA
CCTCGCTGTTTATTTTTGCCAGCAGCACTTCCGAACCCCTTTTACTTTTGGCTCAGGCACTA
AGTTGGAAATCAAGGCTTTG
FRP5 variable light chain (anti-Her2)
SEQ ID NO: 360
DIQLTQSHKFLSTSVGDRVSITCKASQDVYNAVAVVYQQKPGQSPKWYSASSRYTGVPSRFT
GSGSGPDFTFTISSVQAEDLAVYFCQQHFRTPFTFGSGTKLEIKAL
Flexible linker
SEQ ID NO: 361
GGCGGAGGAAGCGGAGGTGGGGGC
Flexible linker
SEQ ID NO: 362
GGGSGGGG
FRP5 variable heavy chain (anti-Her2/Neu)
SEQ ID NO: 363
GAAGTCCAATTGCAACAGTCAGGCCCCGAATTGAAAAAGCCCGGCGAAACAGTGAAGATA
TCTTGTAAAGCCTCCGGTTACCCTTTTACGAACTATGGAATGAACTGGGTCAAACAAGCCC
CTGGACAGGGATTGAAGTGGATGGGATGGATCAATACATCAACAGGCGAGTCTACCTTCG
CAGATGATTTCAAAGGTCGCTTTGACTTCTCACTGGAGACCAGTGCAAATACCGCCTACCT
TCAGATTAACAATCTTAAAAGCGAGGATATGGCAACCTACTTTTGCGCAAGATGGGAAGTTT
ATCACGGGTACGTGCCATACTGGGGACAAGGAACGACAGTGACAGTTAGTAGC
FRP5 variable heavy chain (anti-Her2/Neu)
SEQ ID NO: 364
EVQLQQSGPELKKPGETVKISCKASGYPFTNYGMNVVVKQAPGQGLKVVMGWINTSTGESTFA
DDFKGRFDFSLETSANTAYLQINNLKSEDMATYFCARWEVYHGYVPYWGQGTTVTVSS
Linker
SEQ ID NO: 365
GGATCC
Linker
SEQ ID NO: 366
GS
CD34 minimal epitope
SEQ ID NO: 367
GAACTTCCTACTCAGGGGACTTTCTCAAACGTTAGCACAAACGTAAGT
CD34 minimal epitope
SEQ ID NO: 368
ELPTQGTFSNVSTNVS
CD8 alpha stalk
SEQ ID NO: 369
CCCGCCCCAAGACCCCCCACACCTGCGCCGACCATTGCTTCTCAACCCCTGAGTTTGAGA
CCCGAGGCCTGCCGGCCAGCTGCCGGCGGGGCCGTGCATACAAGAGGACTCGATTTCGC
TTGCGAC
CD8 alpha stalk
SEQ ID NO: 370
PAPRPPTPAPTIASQPLSLRPEACRPAAGGAVHTRGLDFACD
CD8 alpha transmembrane region
SEQ ID NO: 371
ATCTATATCTGGGCACCTCTCGCTGGCACCTGTGGAGTCCTTCTGCTCAGCCTGGTTATTA
CTCTGTACTGTAATCACCGGAATCGCCGCCGCGTTTGTAAGTGTCCCAGG
CD8 alpha transmembrane region
SEQ ID NO: 372
IYIWAPLAGTCGVLLLSLVITLYCNHRNRRRVCKCPR
Linker
SEQ ID NO: 373
Ctcgag
Linker
SEQ ID NO: 374
LE
Truncated MyD88
SEQ ID NO: 375
ATGGCCGCTGGGGGCCCAGGCGCCGGATCAGCTGCTCCCGTATCTTCTACTTCTTCTTTG
CCGCTGGCTGCTCTGAACATGCGCGTGAGAAGACGCCTCTCCCTGTTCCTTAACGTTCGC
ACACAAGTCGCTGCCGATTGGACCGCCCTTGCCGAAGAAATGGACTTTGAATACCTGGAA
ATTAGACAACTTGAAACACAGGCCGACCCCACTGGCAGACTCCTGGACGCATGGCAGGGA
AGACCTGGTGCAAGCGTTGGACGGCTCCTGGATCTCCTGACAAAACTGGGACGCGACGAC
GTACTGCTTGAACTCGGACCTAGCATTGAAGAAGACTGCCAAAAATATATCCTGAAACAAC
AACAAGAAGAAGCCGAAAAACCTCTCCAAGTCGCAGCAGTGGACTCATCAGTACCCCGAA
CAGCTGAGCTTGCTGGGATTACTACACTCGACGACCCACTCGGACATATGCCTGAAAGATT
CGACGCTTTCATTTGCTATTGCCCCTCTGACATA
Truncated MyD88
SEQ ID NO: 376
MAAGGPGAGSAAPVSSTSSLPLAALNMRVRRRLSLFLNVRTQVAADVVTALAEEMDFEYLEIRQ
LETQADPTGRLLDAWQGRPGASVGRLLDLLTKLGRDDVLLELGPSIEEDCQKYILKQQQEEAE
KPLQVAAVDSSVPRTAELAGITTLDDPLGHMPERFDAFICYCPSDI
CD40 cytoplasmic domain
SEQ ID NO: 377
AAGAAAGTTGCAAAGAAACCCACAAATAAAGCCCCACACCCTAAACAGGAACCCCAAGAAA
TCAATTTCCCAGATGATCTCCCTGGATCTAATACTGCCGCCCCGGTCCAAGAAACCCTGCA
TGGTTGCCAGCCTGTCACCCAAGAGGACGGAAAAGAATCACGGATTAGCGTACAAGAGAG
ACAA
CD40 cytoplasmic domain
SEQ ID NO: 378
KKVAKKPTNKAPHPKQEPQEINFPDDLPGSNTAAPVQETLHGCQPVTQEDGKESRISVQERQ
Linker
SEQ ID NO: 379
gcggccgcagtcgag
Linker
SEQ ID NO: 380
AAAVE
CD3 zeta cytoplasmic domain
SEQ ID NO: 381
AGAGTGAAGTTCAGCAGGAGCGCAGACGCCCCCGCGTACCAGCAGGGCCAGAACCAGCT
CTATAACGAGCTCAATCTAGGACGAAGAGAGGAGTACGATGTTTTGGACAAGAGACGTGG
CCGGGACCCTGAGATGGGGGGAAAGCCGAGAAGGAAGAACCCTCAGGAAGGCCTGTACA
ATGAACTGCAGAAAGATAAGATGGCGGAGGCCTACAGTGAGATTGGGATGAAAGGCGAGC
GCCGGAGGGGCAAGGGGCACGATGGCCTTTACCAGGGTCTCAGTACAGCCACCAAGGAC
ACCTACGACGCCCTTCACATGCAGGCCCTGCCCCCTCGC
CD3 zeta cytoplasmic domain
SEQ ID NO: 382
RVKFSRSADAPAYQQGQNQLYNELNLGRREEYDVLDKRRGRDPEMGGKPRRKNPQEGLYNE
LQKDKMAEAYSEIGMKGERRRGKGHDGLYQGLSTATKDTYDALHMQALPPR

### Example 16: Additional Sequences

SEQ ID NO: 383 ΔCasp9(res. 135-416)
G F G D V G A L E S L R G N A D L A Y I L S M E P C G H C L I I N N V
N F C R E S G L R T R T G S N I D C E K L R R R F S S L H F M V E V K
G D L T A K K M V L A L L E L A R Q D H G A L D C C V V V I L S H G C
Q A S H L Q F P G A V Y G T D G C P V S V E K I V N I F N G T S C P S
L G G K P K L F F I Q A C G G E Q K D H G F E V A S T S P E D E S P G
S N P E P D A T P F Q E G L R T F D Q L D A I S S L P T P S D I F V S
Y S T F P G F V S W R D P K S G S W Y V E T L D D I F E Q W A H S E
D L Q S L L L R V A N A V S V K G I Y K Q M P G C F N F L R K K L F F
K T S,
SEQ ID NO: 384 ΔCasp9(res. 135-416) D330A, nucleotide sequence
GGATTTGGTGATGTCGGTGCTCTTGAGAGTTTGAGGGGAAATGCAGATTTGGCTTACATCC
TGAGCATGGAGCCCTGTGGCCACTGCCTCATTATCAACAATGTGAACTTCTGCCGTGAGTC
CGGGCTCCGCACCCGCACTGGCTCCAACATCGACTGTGAGAAGTTGCGGCGTCGCTTCTC
CTCGCTGCATTTCATGGTGGAGGTGAAGGGCGACCTGACTGCCAAGAAAATGGTGCTGGC
TTTGCTGGAGCTGGCGCgGCAGGACCACGGTGCTCTGGACTGCTGCGTGGTGGTCATTCT
CTCTCACGGCTGTCAGGCCAGCCACCTGCAGTTCCCAGGGGCTGTCTACGGCACAGATG
GATGCCCTGTGTCGGTCGAGAAGATTGTGAACATCTTCAATGGGACCAGCTGCCCCAGCC
TGGGAGGGAAGCCCAAGCTCTTTTTCATCCAGGCCTGTGGTGGGGAGCAGAAAGACCATG
GGTTTGAGGTGGCCTCCACTTCCCCTGAAGACGAGTCCCCTGGCAGTAACCCCGAGCCAG
ATGCCACCCCGTTCCAGGAAGGTTTGAGGACCTTCGACCAGCTGGCCGCCATATCTAGTT
TGCCCACACCCAGTGACATCTTTGTGTCCTACTCTACTTTCCCAGGTTTTGTTTCCTGGAGG
GACCCCAAGAGTGGCTCCTGGTACGTTGAGACCCTGGACGACATCTTTGAGCAGTGGGCT
CACTCTGAAGACCTGCAGTCCCTCCTGCTTAGGGTCGCTAATGCTGTTTCGGTGAAAGGG
ATTTATAAACAGATGCCTGGTTGCTTTAATTTCCTCCGGAAAAAACTTTTCTTTAAAACATCA,
SEQ ID NO: 385 ΔCasp9(res. 135-416) D330A, amino acid sequence
G F G D V G A L E S L R G N A D L A Y I L S M E P C G H C L I I N N V
N F C R E S G L R T R T G S N I D C E K L R R R F S S L H F M V E V K
G D L T A K K M V L A L L E L A R Q D H G A L D C C V V V I L S H G C
Q A S H L Q F P G A V Y G T D G C P V S V E K I V N I F N G T S C P S
L G G K P K L F F I Q A C G G E Q K D H G F E V A S T S P E D E S P G
S N P E P D A T P F Q E G L R T F D Q L A A I S S L P T P S D I F V S
Y S T F P G F V S W R D P K S G S W Y V E T L D D I F E Q W A H S E
D L Q S L L L R V A N A V S V K G I Y K Q M P G C F N F L R K K L F F
K T S,
SEQ ID NO: 386 ΔCasp9(res. 135-416) N405Q nucleotide sequence
GGATTTGGTGATGTCGGTGCTCTTGAGAGTTTGAGGGGAAATGCAGATTTGGCTTACATCC
TGAGCATGGAGCCCTGTGGCCACTGCCTCATTATCAACAATGTGAACTTCTGCCGTGAGTC
CGGGCTCCGCACCCGCACTGGCTCCAACATCGACTGTGAGAAGTTGCGGCGTCGCTTCTC
CTCGCTGCATTTCATGGTGGAGGTGAAGGGCGACCTGACTGCCAAGAAAATGGTGCTGGC
TTTGCTGGAGCTGGCGCgGCAGGACCACGGTGCTCTGGACTGCTGCGTGGTGGTCATTCT
CTCTCACGGCTGTCAGGCCAGCCACCTGCAGTTCCCAGGGGCTGTCTACGGCACAGATG
GATGCCCTGTGTCGGTCGAGAAGATTGTGAACATCTTCAATGGGACCAGCTGCCCCAGCC
TGGGAGGGAAGCCCAAGCTCTTTTTCATCCAGGCCTGTGGTGGGGAGCAGAAAGACCATG
GGTTTGAGGTGGCCTCCACTTCCCCTGAAGACGAGTCCCCTGGCAGTAACCCCGAGCCAG
ATGCCACCCCGTTCCAGGAAGGTTTGAGGACCTTCGACCAGCTGGACGCCATATCTAGTTT
GCCCACACCCAGTGACATCTTTGTGTCCTACTCTACTTTCCCAGGTTTTGTTTCCTGGAGG
GACCCCAAGAGTGGCTCCTGGTACGTTGAGACCCTGGACGACATCTTTGAGCAGTGGGCT
CACTCTGAAGACCTGCAGTCCCTCCTGCTTAGGGTCGCTAATGCTGTTTCGGTGAAAGGG
ATTTATAAACAGATGCCTGGTTGCTTTCAGTTCCTCCGGAAAAAACTTTTCTTTAAAACATCA,
SEQ ID NO: 387 ΔCasp9(res. 135-416) N405Q amino acid sequence
G F G D V G A L E S L R G N A D L A Y I L S M E P C G H C L I I N N V
N F C R E S G L R T R T G S N I D C E K L R R R F S S L H F M V E V K
G D L T A K K M V L A L L E L A R Q D H G A L D C C V V V I L S H G C
Q A S H L Q F P G A V Y G T D G C P V S V E K I V N I F N G T S C P S
L G G K P K L F F I Q A C G G E Q K D H G F E V A S T S P E D E S P G
S N P E P D A T P F Q E G L R T F D Q L D A I S S L P T P S D I F V S
Y S T F P G F V S W R D P K S G S W Y V E T L D D I F E Q W A H S E
D L Q S L L L R V A N A V S V K G I Y K Q M P G C F Q F L R K K L F F
K T S,
SEQ ID NO: 388 ΔCasp9(res. 135-416) D330A N405Q nucleotide sequence
GGATTTGGTGATGTCGGTGCTCTTGAGAGTTTGAGGGGAAATGCAGATTTGGCTTACATCC
TGAGCATGGAGCCCTGTGGCCACTGCCTCATTATCAACAATGTGAACTTCTGCCGTGAGTC
CGGGCTCCGCACCCGCACTGGCTCCAACATCGACTGTGAGAAGTTGCGGCGTCGCTTCTC
CTCGCTGCATTTCATGGTGGAGGTGAAGGGCGACCTGACTGCCAAGAAAATGGTGCTGGC
TTTGCTGGAGCTGGCGCgGCAGGACCACGGTGCTCTGGACTGCTGCGTGGTGGTCATTCT
CTCTCACGGCTGTCAGGCCAGCCACCTGCAGTTCCCAGGGGCTGTCTACGGCACAGATG
GATGCCCTGTGTCGGTCGAGAAGATTGTGAACATCTTCAATGGGACCAGCTGCCCCAGCC
TGGGAGGGAAGCCCAAGCTCTTTTTCATCCAGGCCTGTGGTGGGGAGCAGAAAGACCATG
GGTTTGAGGTGGCCTCCACTTCCCCTGAAGACGAGTCCCCTGGCAGTAACCCCGAGCCAG
ATGCCACCCCGTTCCAGGAAGGTTTGAGGACCTTCGACCAGCTGGCCGCCATATCTAGTT
TGCCCACACCCAGTGACATCTTTGTGTCCTACTCTACTTTCCCAGGTTTTGTTTCCTGGAGG
GACCCCAAGAGTGGCTCCTGGTACGTTGAGACCCTGGACGACATCTTTGAGCAGTGGGCT
CACTCTGAAGACCTGCAGTCCCTCCTGCTTAGGGTCGCTAATGCTGTTTCGGTGAAAGGG
ATTTATAAACAGATGCCTGGTTGCTTTCAGTTCCTCCGGAAAAAACTTTTCTTTAAAACATCA,
SEQ ID NO: 389 ΔCasp9(res. 135-416)D330A N405Q amino acid sequence
G F G D V G A L E S L R G N A D L A Y I L S M E P C G H C L I I N N V
N F C R E S G L R T R T G S N I D C E K L R R R F S S L H F M V E V K
G D L T A K K M V L A L L E L A R Q D H G A L D C C V V V I L S H G C
Q A S H L Q F P G A V Y G T D G C P V S V E K I V N I F N G T S C P S
L G G K P K L F F I Q A C G G E Q K D H G F E V A S T S P E D E S P G
S N P E P D A T P F Q E G L R T F D Q L A A I S S L P T P S D I F V S
Y S T F P G F V S W R D P K S G S W Y V E T L D D I F E Q W A H S E
D L Q S L L L R V A N A V S V K G I Y K Q M P G C F Q F L R K K L F F
K T S,
SEQ ID NO: 390 Caspase-9.co nucleotide sequence
GTGGACGGGTTTGGAGATGTGGGAGCCCTGGAATCCCTGCGGGGCAATGCCGATCTGGC
TTACATCCTGTCTATGGAGCCTTGCGGCCACTGTCTGATCATTAACAATGTGAACTTCTGCA
GAGAGAGCGGGCTGCGGACCAGAACAGGATCCAATATTGACTGTGAAAAGCTGCGGAGAA
GGTTCTCTAGTCTGCACTTTATGGTCGAGGTGAAAGGCGATCTGACCGCTAAGAAAATGGT
GCTGGCCCTGCTGGAACTGGCTCGGCAGGACCATGGGGCACTGGATTGCTGCGTGGTCG
TGATCCTGAGTCACGGCTGCCAGGCTTCACATCTGCAGTTCCCTGGGGCAGTCTATGGAA
CTGACGGCTGTCCAGTCAGCGTGGAGAAGATCGTGAACATCTTCAACGGCACCTCTTGCC
CAAGTCTGGGCGGGAAGCCCAAACTGTTCTTTATTCAGGCCTGTGGAGGCGAGCAGAAAG
ATCACGGCTTCGAAGTGGCTAGCACCTCCCCCGAGGACGAATCACCTGGAAGCAACCCTG
AGCCAGATGCAACCCCCTTCCAGGAAGGCCTGAGGACATTTGACCAGCTGGATGCCATCT
CAAGCCTGCCCACACCTTCTGACATTTTCGTCTCTTACAGTACTTTCCCTGGATTTGTGAGC
TGGCGCGATCCAAAGTCAGGCAGCTGGTACGTGGAGACACTGGACGATATCTTTGAGCAG
TGGGCCCATTCTGAAGACCTGCAGAGTCTGCTGCTGCGAGTGGCCAATGCTGTCTCTGTG
AAGGGGATCTACAAACAGATGCCAGGATGCTTCCAGTTTCTGAGAAAGAAACTGTTCTTTA
AGACCTCCGCATCTAGGGCC,
SEQ ID NO: 391 Caspase-9.co amino acid sequence
VDGFGDVGALESLRGNADLAYILSMEPCGHCLIINNVNFCRESGLRTRTGSNIDCEKLRRRFSS
LHFMVEVKGDLTAKKMVLALLELARQDHGALDCCVVVILSHGCQASHLQFPGAVYGTDGCPVS
VEKIVNIFNGTSCPSLGGKPKLFFIQACGGEQKDHGFEVASTSPEDESPGSNPEPDATPFQEGL
RTFDQLDAISSLPTPSDIFVSYSTFPGFVSWRDPKSGSVVYVETLDDIFEQWAHSEDLQSLLLRV
ANAVSVKGIYKQMPGCFQFLRKKLFFKTSASRA,
SEQ ID NO: 392: Caspase9 D330E nucleotide sequence
GTCGACGGATTTGGTGATGTCGGTGCTCTTGAGAGTTTGAGGGGAAATGCAGATTTGGCTT
ACATCCTGAGCATGGAGCCCTGTGGCCACTGCCTCATTATCAACAATGTGAACTTCTGCCG
TGAGTCCGGGCTCCGCACCCGCACTGGCTCCAACATCGACTGTGAGAAGTTGCGGCGTC
GCTTCTCCTCGCTGCATTTCATGGTGGAGGTGAAGGGCGACCTGACTGCCAAGAAAATGG
TGCTGGCTTTGCTGGAGCTGGCGCGGCAGGACCACGGTGCTCTGGACTGCTGCGTGGTG
GTCATTCTCTCTCACGGCTGTCAGGCCAGCCACCTGCAGTTCCCAGGGGCTGTCTACGGC
ACAGATGGATGCCCTGTGTCGGTCGAGAAGATTGTGAACATCTTCAATGGGACCAGCTGC
CCCAGCCTGGGAGGGAAGCCCAAGCTCTTTTTCATCCAGGCCTGTGGTGGGGAGCAGAAA
GACCATGGGTTTGAGGTGGCCTCCACTTCCCCTGAAGACGAGTCCCCTGGCAGTAACCCC
GAGCCAGATGCCACCCCGTTCCAGGAAGGTTTGAGGACCTTCGACCAGCTGGcCGCCATA
TCTAGTTTGCCCACACCCAGTGACATCTTTGTGTCCTACTCTACTTTCCCAGGTTTTGTTTC
CTGGAGGGACCCCAAGAGTGGCTCCTGGTACGTTGAGACCCTGGACGACATCTTTGAGCA
GTGGGCTCACTCTGAAGACCTGCAGTCCCTCCTGCTTAGGGTCGCTAATGCTGTTTCGGT
GAAAGGGATTTATAAACAGATGCCTGGTTGCTTTAATTTCCTCCGGAAAAAACTTTTCTTTA
AAACATCAGCTAGCAGAGCC
SEQ ID NO: 188: Caspase9 D330E amino acid sequence
VDGFGDVGALESLRGNADLAYILSMEPCGHCLIINNVNFCRESGLRTRTGSNIDCEKLRRRFSS
LHFMVEVKGDLTAKKMVLALLELARQDHGALDCCVVVILSHGCQASHLQFPGAVYGTDGCPVS
VEKIVNIFNGTSCPSLGGKPKLFFIQACGGEQKDHGFEVASTSPEDESPGSNPEPDATPFQEGL
RTFDQLeAISSLPTPSDIFVSYSTFPGFVSWRDPKSGSVVYVETLDDIFEQWAHSEDLQSLLLRV
ANAVSVKGIYKQMPGCFNFLRKKLFFKTSASRA
Sequences for pBPO509
pBP0509-SFG-PSCAscFv.CH2CH3.CD28tm.zeta.MyD88/CD40 sequence
SEQ ID NO: 189 Signal peptide
ATGGAGTTTGGACTTTCTTGGTTGTTTTTGGTGGCAATTCTGAAGGGTGTCCAGTGTAGCA
GG
SEQ ID NO: 190 Signal peptide
MEFGLSWLFLVAILKGVQCSR
SEQ ID NO: 191 bm2B3 variable light chain
GACATCCAGCTGACACAAAGTCCCAGTAGCCTGTCAGCCAGTGTCGGCGATAGGGTGACA
ATTACATGCTCCGCAAGTAGTAGCGTCAGATTCATACACTGGTACCAGCAGAAGCCTGGGA
AGGCCCCAAAGAGGCTTATCTACGATACCAGTAAACTCGCCTCTGGAGTTCCTAGCCGGTT
TTCTGGATCTGGCAGCGGAACTAGCTACACCCTCACAATCTCCAGTCTGCAACCAGAGGA
CTTTGCAACCTACTACTGCCAGCAATGGAGCAGCTCCCCTTTCACCTTTGGGCAGGGTACT
AAGGTGGAGATCAAG
SEQ ID NO: 192 bm2B3 variable light chain
DIQLTQSPSSLSASVGDRVTITCSASSSVRFIHVVYQQKPGKAPKRLIYDTSKLASGVPSRFSGS
GSGTSYTLTISSLQPEDFATYYCQQWSSSPFTFGQGTKVEIK
SEQ ID NO: 193 Flexible linker
GGCGGAGGAAGCGGAGGTGGGGGC
SEQ ID NO: 194 Flexible linker
GGGSGGGG
SEQ ID NO: 195 bm2B3 variable heavy chain
GAGGTGCAGCTTGTAGAGAGCGGGGGAGGCCTCGTACAGCCAGGGGGCTCTCTGCGCCT
GTCATGTGCAGCTTCAGGATTCAATATAAAGGACTATTACATTCACTGGGTACGGCAAGCT
CCCGGTAAGGGCCTGGAATGGATCGGTTGGATCGACCCTGAAAACGGAGATACAGAATTT
GTGCCCAAGTTCCAGGGAAAGGCTACCATGTCTGCCGATACTTCTAAGAATACAGCATACC
TTCAGATGAATTCTCTCCGCGCCGAGGACACAGCCGTGTATTATTGTAAAACGGGAGGGTT
CTGGGGTCAGGGTACCCTTGTGACTGTGTCTTCC
SEQ ID NO: 196 bm2B3 variable heavy chain
EVQLVESGGGLVQPGGSLRLSCAASGFNIKDYYIHVVVRQAPGKGLEWIGWIDPENGDTEFVPK
FQGKATMSADTSKNTAYLQMNSLRAEDTAVYYCKTGGFWGQGTLVTVSS
SEQ ID NO: 197 Linker
GGGGATCCCGCC
SEQ ID NO: 198 Linker
GDPA
SEQ ID NO: 199 IgG1 hinge region
GAGCCCAAATCTCCTGACAAAACTCACACATGCCCA
SEQ ID NO: 200 IgG1 hinge region
EPKSPDKTHTCP
SEQ ID NO: 201 IgG1 CH2 region
CCGTGCCCAGCACCTGAACTCCTGGGGGGACCGTCAGTCTTCCTCTTCCCCCCAAAACCC
AAAGACACCCTCATGATCTCCCGGACCCCTGAGGTCACATGCGTGGTGGTGGACGTGAGC
CACGAAGACCCTGAGGTCAAGTTCAACTGGTATGTGGACGGCGTGGAGGTGCATAATGCA
AAGACAAAGCCGCGGGAGGAGCAGTACAACAGCACGTACCGTGTGGTCAGCGTCCTCAC
CGTCCTGCACCAGGACTGGCTGAATGGCAAGGAGTACAAGTGCAAGGTCTCCAACAAAGC
CCTCCCAGCCCCCATCGAGAAAACCATCTCCAAAGCCAAA
SEQ ID NO: 202 IgG1 CH2 region
PCPAPELLGGPSVFLFPPKPKDTLMISRTPEVTCVVVDVSHEDPEVKFNVVYVDGVEVHNAKTK
PREEQYNSTYRVVSVLTVLHQDWLNGKEYKCKVSNKALPAPIEKTISKAK
SEQ ID NO: 203 IgG1 CH3 region
GGGCAGCCCCGAGAACCACAGGTGTACACCCTGCCCCCATCCCGGGATGAGCTGACCAA
GAACCAGGTCAGCCTGACCTGCCTGGTCAAAGGCTTCTATCCCAGCGACATCGCCGTGGA
GTGGGAGAGCAATGGGCAACCGGAGAACAACTACAAGACCACGCCTCCCGTGCTGGACT
CCGACGGCTCCTTCTTCCTCTACAGCAAGCTCACCGTGGACAAGAGCAGGTGGCAGCAGG
GGAACGTCTTCTCATGCTCCGTGATGCATGAGGCTCTGCACAACCACTACACGCAGAAGA
GCCTCTCCCTGTCTCCGGGTAAA
SEQ ID NO: 204 IgG1 CH3 region
GQPREPQVYTLPPSRDELTKNQVSLTCLVKGFYPSDIAVEWESNGQPENNYKTTPPVLDSDGS
FFLYSKLTVDKSRWQQGNVFSCSVMHEALHNHYTQKSLSLSPGK
SEQ ID NO: 205 Linker
AAAGATCCCAAA
SEQ ID NO: 206 Linker
KDPK
SEQ ID NO: 207 CD28 transmembrane region
TTTTGGGTGCTGGTGGTGGTTGGTGGAGTCCTGGCTTGCTATAGCTTGCTAGTAACAGTG
GCCTTTATTATT
SEQ ID NO: 208 CD28 transmembrane region
FWVLVVVGGVLACYSLLVTVAFII
SEQ ID NO: 209 Linker
gccggc
SEQ ID NO: 210 Linker
AG
SEQ ID NO: 211 CD3 zeta
AGAGTGAAGTTCAGCAGGAGCGCAGACGCCCCCGCGTACCAGCAGGGCCAGAACCAGCT
CTATAACGAGCTCAATCTAGGACGAAGAGAGGAGTACGATGTTTTGGACAAGAGACGTGG
CCGGGACCCTGAGATGGGGGGAAAGCCGAGAAGGAAGAACCCTCAGGAAGGCCTGTACA
ATGAACTGCAGAAAGATAAGATGGCGGAGGCCTACAGTGAGATTGGGATGAAAGGCGAGC
GCCGGAGGGGCAAGGGGCACGATGGCCTTTACCAGGGTCTCAGTACAGCCACCAAGGAC
ACCTACGACGCCCTTCACATGCAGGCCCTGCCCCCTCGC
SEQ ID NO: 212 CD3 zeta
RVKFSRSADAPAYQQGQNQLYNELNLGRREEYDVLDKRRGRDPEMGGKPRRKNPQEGLYNE
LQKDKMAEAYSEIGMKGERRRGKGHDGLYQGLSTATKDTYDALHMQALPPR
SEQ ID NO: 213 MyD88
GCCGCTGGGGGCCCAGGCGCCGGATCAGCTGCTCCCGTATCTTCTACTTCTTCTTTGCCG
CTGGCTGCTCTGAACATGCGCGTGAGAAGACGCCTCTCCCTGTTCCTTAACGTTCGCACA
CAAGTCGCTGCCGATTGGACCGCCCTTGCCGAAGAAATGGACTTTGAATACCTGGAAATTA
GACAACTTGAAACACAGGCCGACCCCACTGGCAGACTCCTGGACGCATGGCAGGGAAGA
CCTGGTGCAAGCGTTGGACGGCTCCTGGATCTCCTGACAAAACTGGGACGCGACGACGTA
CTGCTTGAACTCGGACCTAGCATTGAAGAAGACTGCCAAAAATATATCCTGAAACAACAAC
AAGAAGAAGCCGAAAAACCTCTCCAAGTCGCAGCAGTGGACTCATCAGTACCCCGAACAG
CTGAGCTTGCTGGGATTACTACACTCGACGACCCACTCGGACATATGCCTGAAAGATTCGA
CGCTTTCATTTGCTATTGCCCCTCTGACATA
SEQ ID NO: 214 MyD88
AAGGPGAGSAAPVSSTSSLPLAALNMRVRRRLSLFLNVRTQVAADVVTALAEEMDFEYLEIRQL
ETQADPTGRLLDAWQGRPGASVGRLLDLLTKLGRDDVLLELGPSIEEDCQKYILKQQQEEAEK
PLQVAAVDSSVPRTAELAGITTLDDPLGHMPERFDAFICYCPSDI
SEQ ID NO: 215 CD40
AAGAAAGTTGCAAAGAAACCCACAAATAAAGCCCCACACCCTAAACAGGAACCCCAAGAAA
TCAATTTCCCAGATGATCTCCCTGGATCTAATACTGCCGCCCCGGTCCAAGAAACCCTGCA
TGGTTGCCAGCCTGTCACCCAAGAGGACGGAAAAGAATCACGGATTAGCGTACAAGAGAG
ACAATAG
SEQ ID NO: 216 CD40
KKVAKKPTNKAPHPKQEPQEINFPDDLPGSNTAAPVQETLHGCQPVTQEDGKESRISVQERQ*
Sequences for pBP0425
pBP0521-SFG-CD19scFv.CH2CH3.CD28tm.MyD88/CD40.zeta sequence
SEQ ID NO: 217 Signal peptide
ATGGAGTTTGGACTTTCTTGGTTGTTTTTGGTGGCAATTCTGAAGGGTGTCCAGTGTAGCA
GG
SEQ ID NO: 218 Signal peptide
MEFGLSWLFLVAILKGVQCSR
SEQ ID NO: 219 FMC63 variable light chain
GACATCCAGAT
GACACAGACTACATCCTCCCTGTCTGCCTCTCTGGGAGACAGAGTCACCATCAGTTGCAG
GGCAAGTCAGGACATTAGTAAATATTTAAATTGGTATCAGCAGAAACCAGATGGAACTGTTA
AACTCCTGATCTACCATACATCAAGATTACACTCAGGAGTCCCATCAAGGTTCAGTGGCAG
TGGGTCTGGAACAGATTATTCTCTCACCATTAGCAACCTGGAGCAAGAAGATATTGCCACT
TACTTTTGCCAACAGGGTAATACGCTTCCGTACACGTTCGGAGGGGGGACTAAGTTGGAAA
TAACA
SEQ ID NO: 220 FMC63 variable light chain
DIQMTQTTSSLSASLGDRVTISCRASQDISKYLNVVYQQKPDGTVKLLIYHTSRLHSGVPSRFSG
SGSGTDYSLTISNLEQEDIATYFCQQGNTLPYTFGGGTKLEIT
SEQ ID NO: 221 Flexible linker
GGCGGAGGAAGCGGAGGTGGGGGC
SEQ ID NO: 222 Flexible linker
GGGSGGGG
SEQ ID NO: 223 FMC63 variable heavy chain
GAGGTGAAACTGCAGGAGTCAGGACCTGGCCTGGTGGCGCCCTCACAGAGCCTGTCCGT
CACATGCACTGTCTCAGGGGTCTCATTACCCGACTATGGTGTAAGCTGGATTCGCCAGCCT
CCACGAAAGGGTCTGGAGTGGCTGGGAGTAATATGGGGTAGTGAAACCACATACTATAATT
CAGCTCTCAAATCCAGACTGACCATCATCAAGGACAACTCCAAGAGCCAAGTTTTCTTAAAA
ATGAACAGTCTGCAAACTGATGACACAGCCATTTACTACTGTGCCAAACATTATTACTACGG
TGGTAGCTATGCTATGGACTACTGGGGTCAAGGAACCTCAGTCACCGTCTCCTCA
SEQ ID NO: 224 FMC63 variable heavy chain
EVKLQESGPGLVAPSQSLSVTCTVSGVSLPDYGVSWIRQPPRKGLEWLGVIWGSETTYYNSAL
KSRLTIIKDNSKSQVFLKMNSLQTDDTAIYYCAKHYYYGGSYAMDYWGQGTSVTVSS
SEQ ID NO: 225 Linker
GGGGATCCCGCC
SEQ ID NO: 226 Linker
GDPA
SEQ ID NO: 227 IgG1 hinge
GAGCCCAAATCTCCTGACAAAACTCACACATGCCCA
SEQ ID NO: 228 IgG1 hinge
EPKSPDKTHTCP
SEQ ID NO: 229 IgG1 CH2 region
CCGTGCCCAGCACCTGAACTCCTGGGGGGACCGTCAGTCTTCCTCTTCCCCCCAAAACCC
AAAGACACCCTCATGATCTCCCGGACCCCTGAGGTCACATGCGTGGTGGTGGACGTGAGC
CACGAAGACCCTGAGGTCAAGTTCAACTGGTATGTGGACGGCGTGGAGGTGCATAATGCA
AAGACAAAGCCGCGGGAGGAGCAGTACAACAGCACGTACCGTGTGGTCAGCGTCCTCAC
CGTCCTGCACCAGGACTGGCTGAATGGCAAGGAGTACAAGTGCAAGGTCTCCAACAAAGC
CCTCCCAGCCCCCATCGAGAAAACCATCTCCAAAGCCAAA
SEQ ID NO: 230 IgG1 CH2 region
PCPAPELLGGPSVFLFPPKPKDTLMISRTPEVTCVVVDVSHEDPEVKFNVVYVDGVEVHNAKTK
PREEQYNSTYRVVSVLTVLHQDWLNGKEYKCKVSNKALPAPIEKTISKAK
SEQ ID NO: 231 IgG1 CH3 region
GGGCAGCCCCGAGAACCACAGGTGTACACCCTGCCCCCATCCCGGGATGAGCTGACCAA
GAACCAGGTCAGCCTGACCTGCCTGGTCAAAGGCTTCTATCCCAGCGACATCGCCGTGGA
GTGGGAGAGCAATGGGCAACCGGAGAACAACTACAAGACCACGCCTCCCGTGCTGGACT
CCGACGGCTCCTTCTTCCTCTACAGCAAGCTCACCGTGGACAAGAGCAGGTGGCAGCAGG
GGAACGTCTTCTCATGCTCCGTGATGCATGAGGCTCTGCACAACCACTACACGCAGAAGA
GCCTCTCCCTGTCTCCGGGTAAA
SEQ ID NO: 232 IgG1 CH3 region
GQPREPQVYTLPPSRDELTKNQVSLTCLVKGFYPSDIAVEWESNGQPENNYKTTPPVLDSDGS
FFLYSKLTVDKSRWQQGNVFSCSVMHEALHNHYTQKSLSLSPGK
SEQ ID NO: 233 Linker
AAAGATCCCAAA
SEQ ID NO: 234 Linker
KDPK
SEQ ID NO: 235 CD28 transmembrane region
TTTTGGGTGCTGGTGGTGGTTGGTGGAGTCCTGGCTTGCTATAGCTTGCTAGTAACAGTG
GCCTTTATTATT
SEQ ID NO: 236 CD28 transmembrane region
FWVLVVVGGVLACYSLLVTVAFII
SEQ ID NO: 237 Linker
Ctcgag
SEQ ID NO: 238 Linker
LE
SEQ ID NO: 239 MyD88
ATGGCCGCTGGGGGCCCAGGCGCCGGATCAGCTGCTCCCGTATCTTCTACTTCTTCTTTG
CCGCTGGCTGCTCTGAACATGCGCGTGAGAAGACGCCTCTCCCTGTTCCTTAACGTTCGC
ACACAAGTCGCTGCCGATTGGACCGCCCTTGCCGAAGAAATGGACTTTGAATACCTGGAA
ATTAGACAACTTGAAACACAGGCCGACCCCACTGGCAGACTCCTGGACGCATGGCAGGGA
AGACCTGGTGCAAGCGTTGGACGGCTCCTGGATCTCCTGACAAAACTGGGACGCGACGAC
GTACTGCTTGAACTCGGACCTAGCATTGAAGAAGACTGCCAAAAATATATCCTGAAACAAC
AACAAGAAGAAGCCGAAAAACCTCTCCAAGTCGCAGCAGTGGACTCATCAGTACCCCGAA
CAGCTGAGCTTGCTGGGATTACTACACTCGACGACCCACTCGGACATATGCCTGAAAGATT
CGACGCTTTCATTTGCTATTGCCCCTCTGACATA
SEQ ID NO: 240 MyD88
MAAGGPGAGSAAPVSSTSSLPLAALNMRVRRRLSLFLNVRTQVAADWTALAEEMDFEYLEIRQ
LETQADPTGRLLDAWQGRPGASVGRLLDLLTKLGRDDVLLELGPSIEEDCQKYILKQQQEEAE
KPLQVAAVDSSVPRTAELAGITTLDDPLGHMPERFDAFICYCPSDI
SEQ ID NO: 241 CD40
AAGAAAGTTGCAAAGAAACCCACAAATAAAGCCCCACACCCTAAACAGGAACCCCAAGAAA
TCAATTTCCCAGATGATCTCCCTGGATCTAATACTGCCGCCCCGGTCCAAGAAACCCTGCA
TGGTTGCCAGCCTGTCACCCAAGAGGACGGAAAAGAATCACGGATTAGCGTACAAGAGAG
ACAA
SEQ ID NO: 242 CD40
KKVAKKPTNKAPHPKQEPQEINFPDDLPGSNTAAPVQETLHGCQPVTQEDGKESRISVQERQ
SEQ ID NO: 243 Linker
gcggccgcagTCGAG
SEQ ID NO: 244 Linker
AAAVE
SEQ ID NO: 245 CD3 zeta chain
AGAGTGAAGTTCAGCAGGAGCGCAGACGCCCCCGCGTACCAGCAGGGCCAGAACCAGCT
CTATAACGAGCTCAATCTAGGACGAAGAGAGGAGTACGATGTTTTGGACAAGAGACGTGG
CCGGGACCCTGAGATGGGGGGAAAGCCGAGAAGGAAGAACCCTCAGGAAGGCCTGTACA
ATGAACTGCAGAAAGATAAGATGGCGGAGGCCTACAGTGAGATTGGGATGAAAGGCGAGC
GCCGGAGGGGCAAGGGGCACGATGGCCTTTACCAGGGTCTCAGTACAGCCACCAAGGAC
ACCTACGACGCCCTTCACATGCAGGCCCTGCCCCCTCGCTAA
SEQ ID NO: 246 CD3 zeta chain
RVKFSRSADAPAYQQGQNQLYNELNLGRREEYDVLDKRRGRDPEMGGKPRRKNPQEGLYNE
LQKDKMAEAYSEIGMKGERRRGKGHDGLYQGLSTATKDTYDALHMQALPPR*
Sequences for SFG-Myr.MC-2A-CD19.scfv.CD34e.CD8stm.zeta
SFG-Myr.MC.2A.CD19scFv.CD34e.CD8stm.zeta sequence
SEQ ID NO: 247 Myristolation
atggggagtagcaagagcaagcctaaggaccccagccagcgc
SEQ ID NO: 248 Myristolation
MGSSKSKPKDPSQR
SEQ ID NO: 249 Linker
ctcgac
SEQ ID NO: 250 Linker
LD
SEQ ID NO: 251 MyD88
atggctgcaggaggtcccggcgcggggtctgcggccccggtctcctccacatcctcccttcccctggctgctctcaacatgcgagtgcg
gcgccgcctgtctctgttcttgaacgtgcggacacaggtggcggccgactggaccgcgctggcggaggagatggactttgagtacttg
gagatccggcaactggagacacaagcggaccccactggcaggctgctggacgcctggcagggacgccctggcgcctctgtaggc
cgactgctcgatctgcttaccaagctgggccgcgacgacgtgctgctggagctgggacccagcattgaggaggattgccaaaagtat
atcttgaagcagcagcaggaggaggctgagaagcctttacaggtggccgctgtagacagcagtgtcccacggacagcagagctgg
cgggcatcaccacacttgatgaccccctggggcatatgcctgagcgtttcgatgccttcatctgctattgccccagcgacatc
SEQ ID NO: 252 MyD88
MAAGGPGAGSAAPVSSTSSLPLAALNMRVRRRLSLFLNVRTQVAADVVTALAEEMDFEYLEIRQ
LETQADPTGRLLDAWQGRPGASVGRLLDLLTKLGRDDVLLELGPSIEEDCQKYILKQQQEEAE
KPLQVAAVDSSVPRTAELAGITTLDDPLGHMPERFDAFICYCPSDI
SEQ ID NO: 253 Linker
gtcgag
SEQ ID NO: 254 Linker
VE
SEQ ID NO: 255 CD40
aaaaaggtggccaagaagccaaccaataaggccccccaccccaagcaggagccccaggagatcaattttcccgacgatcttcct
ggctccaacactgctgctccagtgcaggagactttacatggatgccaaccggtcacccaggaggatggcaaagagagtcgcatctc
agtgcaggagagacag
SEQ ID NO: 256 CD40
KKVAKKPTNKAPHPKQEPQEINFPDDLPGSNTAAPVQETLHGCQPVTQEDGKESRISVQERQ
SEQ ID NO: 257 Linker
CCGCGG
SEQ ID NO: 258 Linker
PR
SEQ ID NO: 259 T2A sequence
GAAGGCCGAGGGAGCCTGCTGACATGTGGCGATGTGGAGGAAAACCCAGGACCA
SEQ ID NO: 260 T2A sequence
EGRGSLLTCGDVEENPGP
SEQ ID NO: 261 Signal peptide
ATGGAGTTTGGACTTTCTTGGTTGTTTTTGGTGGCAATTCTGAAGGGTGTCCAGTGTAGCA
GG
SEQ ID NO: 262 Signal peptide
MEFGLSWLFLVAILKGVQCSR
SEQ ID NO: 263 FMC63 variable light chain
GACATCCAGATGACACAGACTACATCCTCCCTGTCTGCCTCTCTGGGAGACAGAGTCACCA
TCAGTTGCAGGGCAAGTCAGGACATTAGTAAATATTTAAATTGGTATCAGCAGAAACCAGAT
GGAACTGTTAAACTCCTGATCTACCATACATCAAGATTACACTCAGGAGTCCCATCAAGGTT
CAGTGGCAGTGGGTCTGGAACAGATTATTCTCTCACCATTAGCAACCTGGAGCAAGAAGAT
ATTGCCACTTACTTTTGCCAACAGGGTAATACGCTTCCGTACACGTTCGGAGGGGGGACTA
AGTTGGAAATAACA
SEQ ID NO: 264 FMC63 variable light chain
DIQMTQTTSSLSASLGDRVTISCRASQDISKYLNVVYQQKPDGTVKLLIYHTSRLHSGVPSRFSG
SGSGTDYSLTISNLEQEDIATYFCQQGNTLPYTFGGGTKLEIT
SEQ ID NO: 265 Flexible linker
GGCGGAGGAAGCGGAGGTGGGGGC
SEQ ID NO: 266 Flexible linker
GGGSGGGG
SEQ ID NO: 267 FMC63 variable heavy chain
GAGGTGAAACTGCAGGAGTCAGGACCTGGCCTGGTGGCGCCCTCACAGAGCCTGTCCGT
CACATGCACTGTCTCAGGGGTCTCATTACCCGACTATGGTGTAAGCTGGATTCGCCAGCCT
CCACGAAAGGGTCTGGAGTGGCTGGGAGTAATATGGGGTAGTGAAACCACATACTATAATT
CAGCTCTCAAATCCAGACTGACCATCATCAAGGACAACTCCAAGAGCCAAGTTTTCTTAAAA
ATGAACAGTCTGCAAACTGATGACACAGCCATTTACTACTGTGCCAAACATTATTACTACGG
TGGTAGCTATGCTATGGACTACTGGGGTCAAGGAACCTCAGTCACCGTCTCCTCA
SEQ ID NO: 268 FMC63 variable heavy chain
EVKLQESGPGLVAPSQSLSVTCTVSGVSLPDYGVSWIRQPPRKGLEWLGVIWGSETTYYNSAL
KSRLTIIKDNSKSQVFLKMNSLQTDDTAIYYCAKHYYYGGSYAMDYWGQGTSVTVSS
SEQ ID NO: 269 Linker
GGATCC
SEQ ID NO: 270 Linker
GS
SEQ ID NO: 271 CD34 minimal epitope
GAACTTCCTACTCAGGGGACTTTCTCAAACGTTAGCACAAACGTAAGT
SEQ ID NO: 272 CD34 minimal epitope
ELPTQGTFSNVSTNVS
SEQ ID NO: 273 CD8 alpha stalk domain
CCCGCCCCAAGACCCCCCACACCTGCGCCGACCATTGCTTCTCAACCCCTGAGTTTGAGA
CCCGAGGCCTGCCGGCCAGCTGCCGGCGGGGCCGTGCATACAAGAGGACTCGATTTCGC
TTGCGAC
SEQ ID NO: 274 CD8 alpha stalk domain
PAPRPPTPAPTIASQPLSLRPEACRPAAGGAVHTRGLDFACD
SEQ ID NO: 275 CD8 alpha transmembrane domain
ATCTATATCTGGGCACCTCTCGCTGGCACCTGTGGAGTCCTTCTGCTCAGCCTGGTTATTA
CTCTGTACTGTAATCACCGGAATCGCCGCCGCGTTTGTAAGTGTCCCAGG
SEQ ID NO: 276 CD8 alpha transmembrane domain
IYIWAPLAGTCGVLLLSLVITLYCNHRNRRRVCKCPR
SEQ ID NO: 277 Linker
GTCGAC
SEQ ID NO: 278 Linker
VD
SEQ ID NO: 279 CD3 zeta
AGAGTGAAGTTCAGCAGGAGCGCAGACGCCCCCGCGTACCAGCAGGGCCAGAACCAGCT
CTATAACGAGCTCAATCTAGGACGAAGAGAGGAGTACGATGTTTTGGACAAGAGACGTGG
CCGGGACCCTGAGATGGGGGGAAAGCCGAGAAGGAAGAACCCTCAGGAAGGCCTGTACA
ATGAACTGCAGAAAGATAAGATGGCGGAGGCCTACAGTGAGATTGGGATGAAAGGCGAGC
GCCGGAGGGGCAAGGGGCACGATGGCCTTTACCAGGGTCTCAGTACAGCCACCAAGGAC
ACCTACGACGCCCTTCACATGCAGGCCCTGCCCCCTCGC
SEQ ID NO: 280 CD3 zeta
RVKFSRSADAPAYQQGQNQLYNELNLGRREEYDVLDKRRGRDPEMGGKPRRKNPQEGLYNE
LQKDKMAEAYSEIGMKGERRRGKGHDGLYQGLSTATKDTYDALHMQALPPR
SEQ ID NO: 281 (MyD88 nucleotide sequence)
atggctgcaggaggtcccggcgcggggtctgcggccccggtctcctccacatcctcccttcccctggctgctctcaacatgcgagtgcg
gcgccgcctgtctctgttcttgaacgtgcggacacaggtggcggccgactggaccgcgctggcggaggagatggactttgagtacttg
gagatccggcaactggagacacaagcggaccccactggcaggctgctggacgcctggcagggacgccctggcgcctctgtaggc
cgactgctcgagctgcttaccaagctgggccgcgacgacgtgctgctggagctgggacccagcattgaggaggattgccaaaagta
tatcttgaagcagcagcaggaggaggctgagaagcctttacaggtggccgctgtagacagcagtgtcccacggacagcagagctg
gcgggcatcaccacacttgatgaccccctggggcatatgcctgagcgtttcgatgccttcatctgctattgccccagcgacatccagtttg
tgcaggagatgatccggcaactggaacagacaaactatcgactgaagttgtgtgtgtctgaccgcgatgtcctgcctggcacctgtgtc
tggtctattgctagtgagctcatcgaaaagaggtgccgccggatggtggtggttgtctctgatgattacctgcagagcaaggaatgtgac
ttccagaccaaatttgcactcagcctctctccaggtgcccatcagaagcgactgatccccatcaagtacaaggcaatgaagaaagag
ttccccagcatcctgaggttcatcactgtctgcgactacaccaacccctgcaccaaatcttggttctggactcgccttgccaaggccttgt
ccctgccc
SEQ ID NO: 282 (MyD88 amino acid sequence)
M A A G G P G A G S A A P V S S T S S L P L A A L N M R V R R R L S
L F L N V R T Q V A A D W T A L A E E M D F E Y L E I R Q L E T Q A D
P T G R L L D A W Q G R P G A S V G R L L E L L T K L G R D D V L L E
L G P S I E E D C Q K Y I L K Q Q Q E E A E K P L Q V A A V D S S V P
R T A E L A G I T T L D D P L G H M P E R F D A F I C Y C P S D I Q F
V Q E M I R Q L E Q T N Y R L K L C V S D R D V L P G T C V W S I A S
E L I E K R C R R M V V V V S D D Y L Q S K E C D F Q T K F A L S L S
P G A H Q K R L I P I K Y K A M K K E F P S I L R F I T V C D Y T N P C
T K S W F W T R L A K A L S L P

### Example 17: Development of Improved Therapeutic Cell Dimmer Switch

[0758] Therapy using autologous T cells expressing chimeric antigen receptors (CARs) directed toward tumor-associated antigens (TAAs) has had a transformational effect on the treatment of certain types of leukemias (“liquid tumors”) and lymphomas with objective response (OR) rates approaching 90%. Despite their great clinical promise and the predictable accompanying enthusiasm, this success is tempered by the observed high level of on-target, off-tumor adverse events, typical of a cytokine release syndrome (CRS). To maintain the benefit of these revolutionary treatments while minimizing the risk, a chimeric caspase polypeptide-based suicide gene system has been developed, which is based on synthetic ligand-mediated dimerization of a modified Caspase-9 protein, fused to a ligand binding domain, called FKBP12v36. In the presence of the FKBP12v36-binding to the small molecule dimerizer, rimiducid (AP1903), Caspase-9 is activated, leading to rapid apoptosis of target cells. Addition of reduced levels of rimiducid can lead to a tempered rate of killing, allowing the amount of T cell elimination to be regulated from almost nothing to almost full elimination of chimeric caspase-modified T cells. To maximize the utility of this “dimmer” switch, the slope of the dose-response curve should be as gradual as possible; otherwise, administration of the correct dose is challenging. With the current, first generation, clinical iCaspase-9 construct, a dose response curve covering about 1.5 to 2 logs has been observed.

[0759] To improve on the therapeutic cell dimmer function, a second level of control may be added to Caspase-9 aggregation, separating rapamycin-driven low levels of aggregation from rimiducid-driven high levels of dimerization. In the first level of control, chimeric caspase polypeptides are recruited by rapamycin/sirolimus (or non-immunosuppressant analog) to a chimeric antigen receptor (CAR), which is modified to contain one or more copies of the 89-amino acid FKBP12-Rapamycin-Binding (FRB) domain (encoded within mTOR) on its carboxy terminus (FIG. 3, left panel). Relative to rimiducid-driven homodimerization of iCaspase-9, it is predicted that the level of Caspase-9 oligomerization would be reduced, both due to the relative affinities of rapamycin-bound FKBP12v36 to FRB (K_{d}˜4 nM) vs rimiducid-bound FKBP12v36 (˜ 0.1 nM) and due to the “staggered” geometry of the crosslinked proteins. An additional level of “fine-tuning” can be provided at the CAR docking site by changing the number of FRB domains fused to each CAR. Meanwhile, target-dependent specificity will be provided by normal target-driven CAR clustering, which should, in turn, be translated to chimeric caspase polypeptide clustering in the presence of rapamycin. When a maximum level of cell elimination is required, rimiducid can also be administered under the current protocol (i.e., currently 0.4 mg/kg in a 2-hour infusion (FIG. 3, right panel).

### Methods:

[0760] Vectors for rapalog-regulated chimeric caspase polypeptide: The Schreiber lab initially identified the minimal FKBP12-rapamycin binding (FRB) domain from mTOR/FRAP (residues 2025-2114), determining it to have a rapamycin dissociation constant (Kd) about 4 nM (Chen J et al (95) PNAS 92, 4947-51). Subsequent studies identified orthogonal mutants of FRB, such as FRBI (L2098) that bind with relatively high affinity to non-immunosuppressant “bumped” rapamycin analogs (“rapalogs”) (Liberles S D (97) PNAS 94, 7825-30; Bayle J H (06) Chem & Biol 13, 99-107). In order to develop modified MC-CARs that can recruit iC9, the carboxy terminal CD3 zeta domain (from pBP0526) and pBP0545, FIG. 7) are fused to 1 or 2 tandem FRB_{L} domains using a commercially synthesized Sall-Mlul fragment that contains MyD88, CD40, and CD3ζ domains to produce vectors pBP0612 and pBP0611, respectively (FIGS. 4 and 5) and Tables 7 and 8. The approach should also be applicable to any CAR construct, including standard, “non-MyD88/CD40” constructs, such as those that include CD28, OX40, and/or 4-1BB, and CD3zeta.

### Results:

[0761] As a proof of principal, two tandem FRBI domains were fused to either a 1^{st} generation Her2-CAR or to a 1^{st} generation CD19-CAR co-expressing inducible Caspase-9. 293 cells were transiently transfected with a constitutive reporter plasmid, SRα-SEAP, along with normalized levels of expression plasmids encoding Her2-CAR-FRB_{I}2, iCaspase-9, Her2-CAR-FRB_{I}2+ iCasp9, iC9-CAR (19). FRB 2 (coexpressing both CD19-CAR-FRB_{I}2 and iCaspase9), or control vector. After 24 hours, cells were washed and distributed into duplicate wells with half-log dilutions of rapamycin or rimiducid. After overnight incubation with drugs, SEAP activity was determined. Interestingly, rapamycin addition led to a broad decrement of SEAP activity up to about a 50% decrease (FIG. 6). This dose-dependent decrease required the presence of both the FRB-tagged CAR and the FKBP-tagged Caspase-9. In contrast, AP1903 decreased SEAP activity to about 20% normal levels at much lower levels of drug, comparable to previous experience. It is likely possible to reduce cell viability with rapamycin and switch to rimiducid for more efficient killing in vivo if necessary. Moreover, on- or off-target-mediated CAR clustering should increase the sensitivity of killing primarily at the site of scFv engagement.

### Additional Permutations of the Hetero-Switch:

[0762] Although inducible Caspase-9 has been found to be the fastest and most CID-sensitive suicide gene tested among a large cohort of inducible signaling molecules, many other proteins or protein domains that lead to apoptosis (or related necroptosis, triggering inflammation and necrosis as the means of cell death) could be adapted to homo- or heterodimer-based killing using this approach.

A Partial List of Proteins that could be Activated by Rapamycin (or Rapalog)-Mediated Membrane Recruitment Includes:
[0763] Other Caspases (i.e., Caspases 1 to 14, which have been identified in mammals)
[0764] Other Caspase-associated adapter molecules, such as FADD (DED), APAF1 (CARD), CRADD/RAIDD (CARD), and ASC (CARD) that function as natural caspase dimerizers (dimerization domains in parentheses).

[0765] Pro-apoptotic Bcl-2 Family members, such as Bax and Bak, which can cause mitochondrial depolarization (or mislocalization of anti-apoptotic family members, like Bcl-xL or Bcl-2).

[0766] RIPK3 or the RIPK1-RHIM domain that can trigger a related form of pro-inflammatory cell death, called necroptosis, due to MLKL-mediated membrane lysis.

[0767] Due to its target-dependent level of aggregation, CAR receptors should provide ideal docking sites for rapamycin-mediated recruitment of pro-apoptotic molecules. Nevertheless, many examples exist of multivalent docking site containing FRB domains that could potentially provide rapalog-mediated cell death in the presence of co-expressed chimeric inducible caspase-like molecules.

TABLE 7
iCasp9-2A-ΔCD19-Q-CD28stm-MCz-FRBI2

| | | SEQ | | SEQ |
|---|---|---|---|---|
| | | ID | | ID |
| Fragment | Nucleotide | NO: | Polypeptide | NO: |
| FKBP12v36 | ATGGGAGTGCAGGTGGAGAC | 393 | MGVQVETISPGDGRTFPKRGQTCVV | 394 |
| | TATTAGCCCCGGAGATGGCA | | HYTGMLEDGKKVDSSRDRNKPFKF | |
| | GAACATTCCCCAAAAGAGGAC | | MLGKQEVIRGWEEGVAQMSVGQRA | |
| | AGACTTGCGTCGTGCATTATA | | KLTISPDYAYGATGHPGIIPPHATLVF | |
| | CTGGAATGCTGGAAGACGGC | | DVELLKLE | |
| | AAGAAGGTGGACAGCAGCCG | | | |
| | GGACCGAAACAAGCCCTTCA | | | |
| | AGTTCATGCTGGGGAAGCAG | | | |
| | GAAGTGATCCGGGGCTGGGA | | | |
| | GGAAGGAGTCGCACAGATGT | | | |
| | CAGTGGGACAGAGGGCCAAA | | | |
| | CTGACTATTAGCCCAGACTAC | | | |
| | GCTTATGGAGCAACCGGCCA | | | |
| | CCCCGGGATCATTCCCCCTCA | | | |
| | TGCTACACTGGTCTTCGATGT | | | |
| | GGAGCTGCTGAAGCTGGAA | | | |
| Linker | AGCGGAGGAGGATCCGGA | 395 | SGGGSG | 396 |
| ΔCaspase-9 | GTGGACGGGTTTGGAGATGT | 397 | SEQ ID NO: 300 | 300 |
| | GGGAGCCCTGGAATCCCTGC | | VDGFGDVGALESLRGNADLAYILSM | |
| | GGGGCAATGCCGATCTGGCT | | EPCGHCLIINNVNFCRESGLRTRTGS | |
| | TACATCCTGTCTATGGAGCCT | | NIDCEKLRRRFSSLHFMVEVKGDLTA | |
| | TGCGGCCACTGTCTGATCATT | | KKMVLALLELARQDHGALDCCVVVIL | |
| | AACAATGTGAACTTCTGCAGA | | SHGCQASHLQFPGAVYGTDGCPVS | |
| | GAGAGCGGGCTGCGGACCAG | | VEKIVNIFNGTSCPSLGGKPKLFFIQA | |
| | AACAGGATCCAATATTGACTG | | CGGEQKDHGFEVASTSPEDESPGS | |
| | TGAAAAGCTGCGGAGAAGGT | | NPEPDATPFQEGLRTFDQLDAISSLP | |
| | TCTCTAGTCTGCACTTTATGG | | TPSDIFVSYSTFPGFVSWRDPKSGS | |
| | TCGAGGTGAAAGGCGATCTG | | WYVETLDDIFEQWAHSEDLQSLLLR | |
| | ACCGCTAAGAAAATGGTGCTG | | VANAVSVKGIYKQMPGCFNFLRKKL | |
| | GCCCTGCTGGAACTGGCTCG | | FFKTSASRA | |
| | GCAGGACCATGGGGCACTGG | | | |
| | ATTGCTGCGTGGTCGTGATCC | | | |
| | TGAGTCACGGCTGCCAGGCT | | | |
| | TCACATCTGCAGTTCCCTGGG | | | |
| | GCAGTCTATGGAACTGACGG | | | |
| | CTGTCCAGTCAGCGTGGAGA | | | |
| | AGATCGTGAACATCTTCAACG | | | |
| | GCACCTCTTGCCCAAGTCTGG | | | |
| | GCGGGAAGCCCAAACTGTTC | | | |
| | TTTATTCAGGCCTGTGGAGGC | | | |
| | GAGCAGAAAGATCACGGCTT | | | |
| | CGAAGTGGCTAGCACCTCCC | | | |
| | CCGAGGACGAATCACCTGGA | | | |
| | AGCAACCCTGAGCCAGATGC | | | |
| | AACCCCCTTCCAGGAAGGCC | | | |
| | TGAGGACATTTGACCAGCTG | | | |
| | GATGCCATCTCAAGCCTGCCC | | | |
| | ACACCTTCTGACATTTTCGTC | | | |
| | TCTTACAGTACTTTCCCTGGA | | | |
| | TTTGTGAGCTGGCGCGATCCA | | | |
| | AAGTCAGGCAGCTGGTACGT | | | |
| | GGAGACACTGGACGATATCTT | | | |
| | TGAGCAGTGGGCCCATTCTG | | | |
| | AAGACCTGCAGAGTCTGCTG | | | |
| | CTGCGAGTGGCCAATGCTGT | | | |
| | CTCTGTGAAGGGGATCTACAA | | | |
| | ACAGATGCCAGGATGCTTCAA | | | |
| | CTTTCTGAGAAAGAAACTGTT | | | |
| | CTTTAAGACCTCCGCATCTAG | | | |
| | GGCC | | | |
| Linker | CCGCGG | 398 | PR | 399 |
| T2A | GAAGGCCGAGGGAGCCTGCT | 400 | EGRGSLLTCGDVEENPGP | 401 |
| | GACATGTGGCGATGTGGAGG | | | |
| | AAAACCCAGGACCA | | | |
| Linker | Ccatgg | 402 | PW | 403 |
| (NcoI) | | | | |
| Sig Peptide | ATGGAGTTTGGACTTTCTTGG | 404 | MEFGLSWLFLVAILKGVQCSR | 405 |
| | TTGTTTTTGGTGGCAATTCTG | | | |
| | AAGGGTGTCCAGTGTAGCAG | | | |
| | G | | | |
| FMC63-VL | GACATCCAGATGACACAGACT | 406 | DIQMTQTTSSLSASLGDRVTISCRAS | 407 |
| | ACATCCTCCCTGTCTGCCTCT | | QDISKYLNWYQQKPDGTVKLLIYHTS | |
| | CTGGGAGACAGAGTCACCAT | | RLHSGVPSRFSGSGSGTDYSLTISNL | |
| | CAGTTGCAGGGCAAGTCAGG | | EQEDIATYFCQQGNTLPYTFGGGTK | |
| | ACATTAGTAAATATTTAAATTG | | LEIT | |
| | GTATCAGCAGAAACCAGATG | | | |
| | GAACTGTTAAACTCCTGATCT | | | |
| | ACCATACATCAAGATTACACT | | | |
| | CAGGAGTCCCATCAAGGTTCA | | | |
| | GTGGCAGTGGGTCTGGAACA | | | |
| | GATTATTCTCTCACCATTAGC | | | |
| | AACCTGGAGCAAGAAGATATT | | | |
| | GCCACTTACTTTTGCCAACAG | | | |
| | GGTAATACGCTTCCGTACACG | | | |
| | TTCGGAGGGGGGACTAAGTT | | | |
| | GGAAATAACA | | | |
| Flex-linker | GGCGGAGGAAGCGGAGGTG | 408 | GGGSGGGG | 409 |
| | GGGGC | | | |
| FMC63-VH | GAGGTGAAACTGCAGGAGTC | 410 | EVKLQESGPGLVAPSQSLSVTCTVS | 411 |
| | AGGACCTGGCCTGGTGGCGC | | GVSLPDYGVSWIRQPPRKGLEWLG | |
| | CCTCACAGAGCCTGTCCGTCA | | VIWGSETTYYNSALKSRLTIIKDNSKS | |
| | CATGCACTGTCTCAGGGGTCT | | QVFLKMNSLQTDDTAIYYCAKHYYY | |
| | CATTACCCGACTATGGTGTAA | | GGSYAMDYWGQGTSVTVSS | |
| | GCTGGATTCGCCAGCCTCCA | | | |
| | CGAAAGGGTCTGGAGTGGCT | | | |
| | GGGAGTAATATGGGGTAGTG | | | |
| | AAACCACATACTATAATTCAG | | | |
| | CTCTCAAATCCAGACTGACCA | | | |
| | TCATCAAGGACAACTCCAAGA | | | |
| | GCCAAGTTTTCTTAAAAATGA | | | |
| | ACAGTCTGCAAACTGATGACA | | | |
| | CAGCCATTTACTACTGTGCCA | | | |
| | AACATTATTACTACGGTGGTA | | | |
| | GCTATGCTATGGACTACTGGG | | | |
| | GTCAAGGAACCTCAGTCACC | | | |
| | GTCTCCTCA | | | |
| Linker | GGATCC | 412 | GS | 413 |
| (BamHI) | | | | |
| CD34 | GAACTTCCTACTCAGGGGACT | 414 | ELPTQGTFSNVSTNVS | 415 |
| epitope | TTCTCAAACGTTAGCACAAAC | | | |
| | GTAAGT | | | |
| CD8a stalk | CCCGCCCCAAGACCCCCCAC | 416 | PAPRPPTPAPTIASQPLSLRPEACRP | 417 |
| | ACCTGCGCCGACCATTGCTTC | | AAGGAVHTRGLDFACD | |
| | TCAACCCCTGAGTTTGAGACC | | | |
| | CGAGGCCTGCCGGCCAGCTG | | | |
| | CCGGCGGGGCCGTGCATACA | | | |
| | AGAGGACTCGATTTCGCTTGC | | | |
| | GAC | | | |
| CD8tm + | ATCTATATCTGGGCACCTCTC | 418 | IYIWAPLAGTCGVLLLSLVITLYCNHR | 419 |
| stop tf | GCTGGCACCTGTGGAGTCCT | | NRRRVCKCPR | |
| | TCTGCTCAGCCTGGTTATTAC | | | |
| | TCTGTACTGTAATCACCGGAA | | | |
| | TCGCCGCCGCGTTTGTAAGT | | | |
| | GTCCCAGG | | | |
| Linker | gtcgac | 420 | VD | 421 |
| (SalI) | | | | |
| MyD88 | ATGGCCGCTGGGGGCCCAGG | 422 | MAAGGPGAGSAAPVSSTSSLPLAAL | 423 |
| | CGCCGGATCAGCTGCTCCCG | | NMRVRRRLSLFLNVRTQVAADWTAL | |
| | TATCTTCTACTTCTTCTTTGCC | | AEEMDFEYLEIRQLETQADPTGRLLD | |
| | GCTGGCTGCTCTGAACATGC | | AWQGRPGASVGRLLDLLTKLGRDD | |
| | GCGTGAGAAGACGCCTCTCC | | VLLELGPSIEEDCQKYILKQQQEEAE | |
| | CTGTTCCTTAACGTTCGCACA | | KPLQVAAVDSSVPRTAELAGITTLDD | |
| | CAAGTCGCTGCCGATTGGAC | | PLGHMPERFDAFICYCPSDI | |
| | CGCCCTTGCCGAAGAAATGG | | | |
| | ACTTTGAATACCTGGAAATTA | | | |
| | GACAACTTGAAACACAGGCC | | | |
| | GACCCCACTGGCAGACTCCT | | | |
| | GGACGCATGGCAGGGAAGAC | | | |
| | CTGGTGCAAGCGTTGGACGG | | | |
| | CTCCTGGATCTCCTGACAAAA | | | |
| | CTGGGACGCGACGACGTACT | | | |
| | GCTTGAACTCGGACCTAGCAT | | | |
| | TGAAGAAGACTGCCAAAAATA | | | |
| | TATCCTGAAACAACAACAAGA | | | |
| | AGAAGCCGAAAAACCTCTCCA | | | |
| | AGTCGCAGCAGTGGACTCAT | | | |
| | CAGTACCCCGAACAGCTGAG | | | |
| | CTTGCTGGGATTACTACACTC | | | |
| | GACGACCCACTCGGACATAT | | | |
| | GCCTGAAAGATTCGACGCTTT | | | |
| | CATTTGCTATTGCCCCTCTGA | | | |
| | CATA | | | |
| dCD40 | AAGAAAGTTGCAAAGAAACCC | 424 | KKVAKKPTNKAPHPKQEPQEINFPD | 425 |
| | ACAAATAAAGCCCCACACCCT | | DLPGSNTAAPVQETLHGCQPVTQED | |
| | AAACAGGAACCCCAAGAAATC | | GKESRISVQERQ | |
| | AATTTCCCAGATGATCTCCCT | | | |
| | GGATCTAATACTGCCGCCCC | | | |
| | GGTCCAAGAAACCCTGCATG | | | |
| | GTTGCCAGCCTGTCACCCAA | | | |
| | GAGGACGGAAAAGAATCACG | | | |
| | GATTAGCGTACAAGAGAGACA | | | |
| | A | | | |
| CD3z | AGAGTGAAGTTCAGCAGGAG | 426 | RVKFSRSADAPAYQQGQNQLYNEL | 427 |
| | CGCAGACGCCCCCGCGTACC | | NLGRREEYDVLDKRRGRDPEMGGK | |
| | AGCAGGGCCAGAACCAGCTC | | PRRKNPQEGLYNELQKDKMAEAYS | |
| | TATAACGAGCTCAATCTAGGA | | EIGMKGERRRGKGHDGLYQGLSTAT | |
| | CGAAGAGAGGAGTACGATGT | | KDTYDALHMQALPPR | |
| | TTTGGACAAGAGACGTGGCC | | | |
| | GGGACCCTGAGATGGGGGGA | | | |
| | AAGCCGAGAAGGAAGAACCC | | | |
| | TCAGGAAGGCCTGTACAATGA | | | |
| | ACTGCAGAAAGATAAGATGGC | | | |
| | GGAGGCCTACAGTGAGATTG | | | |
| | GGATGAAAGGCGAGCGCCGG | | | |
| | AGGGGCAAGGGGCACGATGG | | | |
| | CCTTTACCAGGGTCTCAGTAC | | | |
| | AGCCACCAAGGACACCTACG | | | |
| | ACGCCCTTCACATGCAAGCTC | | | |
| | TTCCACCTCGt | | | |
| Linker | Acg | 428 | T | 429 |
| FRBI\hat{ }\hat{ } | TGGCACGAAGGCCTGGAAGA | 430 | WHEGLEEASRLYFGERNVKGMFEV | 431 |
| | GGCCTCAAGACTTTACTTTGG | | LEPLHAMMERGPQTLKETSFNQAYG | |
| | TGAACGCAACGTTAAAGGCAT | | RDLMEAQEWCRKYMKSGNVKDLLQ | |
| | GTTCGAGGTGCTGGAACCCTT | | AWDLYYHVFRRISK | |
| | GCATGCAATGATGGAGCGAG | | | |
| | GTCCTCAGACACTCAAAGAGA | | | |
| | CATCTTTTAACCAGGCGTATG | | | |
| | GACGGGACCTCATGGAGGCT | | | |
| | CAGGAATGGTGCCGCAAGTA | | | |
| | CATGAAAAGTGGGAATGTGAA | | | |
| | GGATCTGCTGCAAGCATGGG | | | |
| | ATCTGTATTACCACGTGTTTA | | | |
| | GACGGATCAGCAAA | | | |
| Linker | Cgtacg | 432 | RT | 433 |
| (BsiWI) | | | | |
| FRBI | TGGCATGAAGGGTTGGAAGA | 434 | WHEGLEEASRLYFGERNVKGMFEV | 435 |
| | AGCTTCAAGGCTGTACTTCGG | | LEPLHAMMERGPQTLKETSFNQAYG | |
| | AGAGAGGAACGTGAAGGGCA | | RDLMEAQEWCRKYMKSGNVKDLLQ | |
| | TGTTTGAGGTTCTTGAACCTC | | AWDLYYHVFRRISK* | |
| | TGCACGCCATGATGGAACGG | | | |
| | GGACCGCAGACACTGAAAGA | | | |
| | AACCTCTTTTAATCAGGCCTA | | | |
| | CGGCAGAGACCTGATGGAGG | | | |
| | CCCAAGAATGGTGTAGAAAGT | | | |
| | ATATGAAATCCGGTAACGTGA | | | |
| | AAGACCTGCTCCAGGCCTGG | | | |
| | GACCTTTATTACCATGTGTTC | | | |
| | AGGCGGATCAGTAAGTAA | | | |

TABLE 8

| | | SEQ | | SEQ |
|---|---|---|---|---|
| | | ID | | ID |
| Fragment | Nucleotide | NO: | Polypeptide | NO: |
| FKBP12v36 | ATGGGAGTGCAGGTGGAGA | 436 | MGVQVETISPGDGRTFPKRGQTCVV | 437 |
| | CTATTAGCCCCGGAGATGGC | | HYTGMLEDGKKVDSSRDRNKPFKF | |
| | AGAACATTCCCCAAAAGAGG | | MLGKQEVIRGWEEGVAQMSVGQRA | |
| | ACAGACTTGCGTCGTGCATT | | KLTISPDYAYGATGHPGIIPPHATLVF | |
| | ATACTGGAATGCTGGAAGAC | | DVELLKLE | |
| | GGCAAGAAGGTGGACAGCA | | | |
| | GCCGGGACCGAAACAAGCC | | | |
| | CTTCAAGTTCATGCTGGGGA | | | |
| | AGCAGGAAGTGATCCGGGG | | | |
| | CTGGGAGGAAGGAGTCGCA | | | |
| | CAGATGTCAGTGGGACAGA | | | |
| | GGGCCAAACTGACTATTAGC | | | |
| | CCAGACTACGCTTATGGAGC | | | |
| | AACCGGCCACCCCGGGATC | | | |
| | ATTCCCCCTCATGCTACACT | | | |
| | GGTCTTCGATGTGGAGCTGC | | | |
| | TGAAGCTGGAA | | | |
| Linker | AGCGGAGGAGGATCCGGA | 438 | SGGGSG | 439 |
| dCaspase9 | GTGGACGGGTTTGGAGATGT | 440 | VDGFGDVGALESLRGNADLAYILSM | 441 |
| | GGGAGCCCTGGAATCCCTG | | EPCGHCLIINNVNFCRESGLRTRTGS | |
| | CGGGGCAATGCCGATCTGG | | NIDCEKLRRRFSSLHFMVEVKGDLTA | |
| | CTTACATCCTGTCTATGGAG | | KKMVLALLELARQDHGALDCCVVVIL | |
| | CCTTGCGGCCACTGTCTGAT | | SHGCQASHLQFPGAVYGTDGCPVS | |
| | CATTAACAATGTGAACTTCTG | | VEKIVNIFNGTSCPSLGGKPKLFFIQA | |
| | CAGAGAGAGCGGGCTGCGG | | CGGEQKDHGFEVASTSPEDESPGS | |
| | ACCAGAACAGGATCCAATAT | | NPEPDATPFQEGLRTFDQLDAISSLP | |
| | TGACTGTGAAAAGCTGCGGA | | TPSDIFVSYSTFPGFVSWRDPKSGS | |
| | GAAGGTTCTCTAGTCTGCAC | | WYVETLDDIFEQWAHSEDLQSLLLR | |
| | TTTATGGTCGAGGTGAAAGG | | VANAVSVKGIYKQMPGCFNFLRKKL | |
| | CGATCTGACCGCTAAGAAAA | | FFKTSASRA | |
| | TGGTGCTGGCCCTGCTGGAA | | | |
| | CTGGCTCGGCAGGACCATG | | | |
| | GGGCACTGGATTGCTGCGT | | | |
| | GGTCGTGATCCTGAGTCACG | | | |
| | GCTGCCAGGCTTCACATCTG | | | |
| | CAGTTCCCTGGGGCAGTCTA | | | |
| | TGGAACTGACGGCTGTCCAG | | | |
| | TCAGCGTGGAGAAGATCGTG | | | |
| | AACATCTTCAACGGCACCTC | | | |
| | TTGCCCAAGTCTGGGCGGG | | | |
| | AAGCCCAAACTGTTCTTTATT | | | |
| | CAGGCCTGTGGAGGCGAGC | | | |
| | AGAAAGATCACGGCTTCGAA | | | |
| | GTGGCTAGCACCTCCCCCGA | | | |
| | GGACGAATCACCTGGAAGCA | | | |
| | ACCCTGAGCCAGATGCAACC | | | |
| | CCCTTCCAGGAAGGCCTGA | | | |
| | GGACATTTGACCAGCTGGAT | | | |
| | GCCATCTCAAGCCTGCCCAC | | | |
| | ACCTTCTGACATTTTCGTCTC | | | |
| | TTACAGTACTTTCCCTGGATT | | | |
| | TGTGAGCTGGCGCGATCCAA | | | |
| | AGTCAGGCAGCTGGTACGT | | | |
| | GGAGACACTGGACGATATCT | | | |
| | TTGAGCAGTGGGCCCATTCT | | | |
| | GAAGACCTGCAGAGTCTGCT | | | |
| | GCTGCGAGTGGCCAATGCT | | | |
| | GTCTCTGTGAAGGGGATCTA | | | |
| | CAAACAGATGCCAGGATGCT | | | |
| | TCAACTTTCTGAGAAAGAAA | | | |
| | CTGTTCTTTAAGACCTCCGC | | | |
| | ATCTAGGGCC | | | |
| Linker | CCGCGG | 442 | PR | 443 |
| (SaclI) | | | | |
| T2A | GAGGGCAGGGGAAGTCTTC | 444 | EGRGSLLTCGDVEENPGP | 445 |
| | TAACATGCGGGGACGTGGA | | | |
| | GGAAAATCCCGGGCCC | | | |
| Linker (NcoI) | GCATGCGCCACC | 446 | ACAT | 447 |
| Sig Peptide | ATGGAGTTTGGGTTGTCATG | 448 | MEFGLSWLFLVAILKGVQCSR | 449 |
| | GTTGTTTCTCGTCGCTATTCT | | | |
| | CAAAGGTGTACAATGCTCCC | | | |
| | GC | | | |
| FRP5-VH | GAAGTCCAATTGCAACAGTC | 450 | EVQLQQSGPELKKPGETVKISCKAS | 451 |
| | AGGCCCCGAATTGAAAAAGC | | GYPFTNYGMNWVKQAPGQGLKWM | |
| | CCGGCGAAACAGTGAAGATA | | GWINTSTGESTFADDFKGRFDFSLE | |
| | TCTTGTAAAGCCTCCGGTTA | | TSANTAYLQINNLKSEDMATYFCAR | |
| | CCCTTTTACGAACTATGGAAT | | WEVYHGYVPYWGQGTTVTVSS | |
| | GAACTGGGTCAAACAAGCCC | | | |
| | CTGGACAGGGATTGAAGTG | | | |
| | GATGGGATGGATCAATACAT | | | |
| | CAACAGGCGAGTCTACCTTC | | | |
| | GCAGATGATTTCAAAGGTCG | | | |
| | CTTTGACTTCTCACTGGAGA | | | |
| | CCAGTGCAAATACCGCCTAC | | | |
| | CTTCAGATTAACAATCTTAAA | | | |
| | AGCGAGGATATGGCAACCTA | | | |
| | CTTTTGCGCAAGATGGGAAG | | | |
| | TTTATCACGGGTACGTGCCA | | | |
| | TACTGGGGACAAGGAACGA | | | |
| | CAGTGACAGTTAGTAGC | | | |
| Flex-linker | GGCGGTGGAGGCTCCGGTG | 452 | GGGGSGGGGSGGGGS | 453 |
| | GAGGCGGCTCTGGAGGAGG | | | |
| | AGGTTCA | | | |
| FRP5VL | GACATCCAATTGACACAATC | 454 | DIQLTQSHKFLSTSVGDRVSITCKAS | 455 |
| | ACACAAATTTCTCTCAACTTC | | QDVYNAVAWYQQKPGQSPKLLIYSA | |
| | TGTAGGAGACAGAGTGAGCA | | SSRYTGVPSRFTGSGSGPDFTFTISS | |
| | TAACCTGCAAAGCATCCCAG | | VQAEDLAVYFCQQHFRTPFTFGSGT | |
| | GACGTGTACAATGCTGTGGC | | KLEIKAL | |
| | TTGGTACCAACAGAAGCCTG | | | |
| | GACAATCCCCAAAATTGCTG | | | |
| | ATTTATTCTGCCTCTAGTAGG | | | |
| | TACACTGGGGTACCTTCTCG | | | |
| | GTTTACGGGCTCTGGGTCCG | | | |
| | GACCAGATTTCACGTTCACA | | | |
| | ATCAGTTCCGTTCAAGCTGA | | | |
| | AGACCTCGCTGTTTATTTTTG | | | |
| | CCAGCAGCACTTCCGAACCC | | | |
| | CTTTTACTTTTGGCTCAGGCA | | | |
| | CTAAGTTGGAAATCAAGGCT | | | |
| | TTG | | | |
| Linker (NsiI) | Atgcat | 456 | MH | 457 |
| CD34 | GAACTTCCTACTCAGGGGAC | 458 | ELPTQGTFSNVSTNVS | 459 |
| epitope | TTTCTCAAACGTTAGCACAAA | | | |
| | CGTAAGT | | | |
| CD8a stalk | CCCGCCCCAAGACCCCCCA | 460 | PAPRPPTPAPTIASQPLSLRPEACRP | 461 |
| | CACCTGCGCCGACCATTGCT | | AAGGAVHTRGLDFACD | |
| | TCTCAACCCCTGAGTTTGAG | | | |
| | ACCCGAGGCCTGCCGGCCA | | | |
| | GCTGCCGGCGGGGCCGTGC | | | |
| | ATACAAGAGGACTCGATTTC | | | |
| | GCTTGCGAC | | | |
| CD8tm + | ATCTATATCTGGGCACCTCT | 462 | IYIWAPLAGTCGVLLLSLVITLYCNHR | 463 |
| stop tf | CGCTGGCACCTGTGGAGTC | | NRRRVCKCPR | |
| | CTTCTGCTCAGCCTGGTTAT | | | |
| | TACTCTGTACTGTAATCACC | | | |
| | GGAATCGCCGCCGCGTTTGT | | | |
| | AAGTGTCCCAGG | | | |
| Linker(SalI) | gtcgac | 464 | VD | 465 |
| MyD88 | ATGGCCGCTGGGGGCCCAG | 466 | MAAGGPGAGSAAPVSSTSSLPLAAL | 467 |
| | GCGCCGGATCAGCTGCTCC | | NMRVRRRLSLFLNVRTQVAADWTAL | |
| | CGTATCTTCTACTTCTTCTTT | | AEEMDFEYLEIRQLETQADPTGRLLD | |
| | GCCGCTGGCTGCTCTGAACA | | AWQGRPGASVGRLLDLLTKLGRDD | |
| | TGCGCGTGAGAAGACGCCT | | VLLELGPSIEEDCQKYILKQQQEEAE | |
| | CTCCCTGTTCCTTAACGTTC | | KPLQVAAVDSSVPRTAELAGITTLDD | |
| | GCACACAAGTCGCTGCCGAT | | PLGHMPERFDAFICYCPSDI | |
| | TGGACCGCCCTTGCCGAAG | | | |
| | AAATGGACTTTGAATACCTG | | | |
| | GAAATTAGACAACTTGAAAC | | | |
| | ACAGGCCGACCCCACTGGC | | | |
| | AGACTCCTGGACGCATGGCA | | | |
| | GGGAAGACCTGGTGCAAGC | | | |
| | GTTGGACGGCTCCTGGATCT | | | |
| | CCTGACAAAACTGGGACGC | | | |
| | GACGACGTACTGCTTGAACT | | | |
| | CGGACCTAGCATTGAAGAAG | | | |
| | ACTGCCAAAAATATATCCTG | | | |
| | AAACAACAACAAGAAGAAGC | | | |
| | CGAAAAACCTCTCCAAGTCG | | | |
| | CAGCAGTGGACTCATCAGTA | | | |
| | CCCCGAACAGCTGAGCTTGC | | | |
| | TGGGATTACTACACTCGACG | | | |
| | ACCCACTCGGACATATGCCT | | | |
| | GAAAGATTCGACGCTTTCAT | | | |
| | TTGCTATTGCCCCTCTGACA | | | |
| | TA | | | |
| dCD40 | AAGAAAGTTGCAAAGAAACC | 468 | KKVAKKPTNKAPHPKQEPQEINFPD | 469 |
| | CACAAATAAAGCCCCACACC | | DLPGSNTAAPVQETLHGCQPVTQED | |
| | CTAAACAGGAACCCCAAGAA | | GKESRISVQERQ | |
| | ATCAATTTCCCAGATGATCTC | | | |
| | CCTGGATCTAATACTGCCGC | | | |
| | CCCGGTCCAAGAAACCCTGC | | | |
| | ATGGTTGCCAGCCTGTCACC | | | |
| | CAAGAGGACGGAAAAGAATC | | | |
| | ACGGATTAGCGTACAAGAGA | | | |
| | GACAA | | | |
| CD3z | AGAGTGAAGTTCAGCAGGAG | 470 | RVKFSRSADAPAYQQGQNQLYNEL | 471 |
| | CGCAGACGCCCCCGCGTAC | | NLGRREEYDVLDKRRGRDPEMGGK | |
| | CAGCAGGGCCAGAACCAGC | | PRRKNPQEGLYNELQKDKMAEAYS | |
| | TCTATAACGAGCTCAATCTA | | EIGMKGERRRGKGHDGLYQGLSTAT | |
| | GGACGAAGAGAGGAGTACG | | KDTYDALHMQALPPR | |
| | ATGTTTTGGACAAGAGACGT | | | |
| | GGCCGGGACCCTGAGATGG | | | |
| | GGGGAAAGCCGAGAAGGAA | | | |
| | GAACCCTCAGGAAGGCCTGT | | | |
| | ACAATGAACTGCAGAAAGAT | | | |
| | AAGATGGCGGAGGCCTACA | | | |
| | GTGAGATTGGGATGAAAGGC | | | |
| | GAGCGCCGGAGGGGCAAGG | | | |
| | GGCACGATGGCCTTTACCAG | | | |
| | GGTCTCAGTACAGCCACCAA | | | |
| | GGACACCTACGACGCCCTTC | | | |
| | ACATGCAAGCTCTTCCACCT | | | |
| | CGt | | | |
| Linker | Acg | 472 | T | 473 |
| FRBI\hat{ }\hat{ } | TGGCACGAAGGCCTGGAAG | 474 | WHEGLEEASRLYFGERNVKGMFEV | 475 |
| | AGGCCTCAAGACTTTACTTT | | LEPLHAMMERGPQTLKETSFNQAYG | |
| | GGTGAACGCAACGTTAAAGG | | RDLMEAQEWCRKYMKSGNVKDLLQ | |
| | CATGTTCGAGGTGCTGGAAC | | AWDLYYHVFRRISK | |
| | CCTTGCATGCAATGATGGAG | | | |
| | CGAGGTCCTCAGACACTCAA | | | |
| | AGAGACATCTTTTAACCAGG | | | |
| | CGTATGGACGGGACCTCATG | | | |
| | GAGGCTCAGGAATGGTGCC | | | |
| | GCAAGTACATGAAAAGTGGG | | | |
| | AATGTGAAGGATCTGCTGCA | | | |
| | AGCATGGGATCTGTATTACC | | | |
| | ACGTGTTTAGACGGATCAGC | | | |
| | AAA | | | |
| Linker | Cgtacg | 476 | RT | 477 |
| (BsiWI) | | | | |
| FRBI | TGGCATGAAGGGTTGGAAGA | 478 | WHEGLEEASRLYFGERNVKGMFEV | 479 |
| | AGCTTCAAGGCTGTACTTCG | | LEPLHAMMERGPQTLKETSFNQAYG | |
| | GAGAGAGGAACGTGAAGGG | | RDLMEAQEWCRKYMKSGNVKDLLQ | |
| | CATGTTTGAGGTTCTTGAAC | | AWDLYYHVFRRISK* | |
| | CTCTGCACGCCATGATGGAA | | | |
| | CGGGGACCGCAGACACTGA | | | |
| | AAGAAACCTCTTTTAATCAG | | | |
| | GCCTACGGCAGAGACCTGAT | | | |
| | GGAGGCCCAAGAATGGTGT | | | |
| | AGAAAGTATATGAAATCCGG | | | |
| | TAACGTGAAAGACCTGCTCC | | | |
| | AGGCCTGGGACCTTTATTAC | | | |
| | CATGTGTTCAGGCGGATCAG | | | |
| | TAAGTAA | | | |

TABLE 9
pBP0545.pSFG.iCasp9.2A.Her2scFv.Q.CD8stm.MC-zeta

| | | SEQ. | | SEQ. |
|---|---|---|---|---|
| | | ID | | ID |
| Fragment | Nucleotide | NO: | Polypeptide | NO: |
| Kozak | GCCACC | 480 | N/A | 481 |
| (ribosome- | | | | |
| binding | | | | |
| seq.) | | | | |
| FKBP12v36 | ATGGGAGTGCAGGTGGAGA | 481 | MGVQVETISPGDGRTFPKRGQTCVV | 482 |
| | CTATTAGCCCCGGAGATGGC | | HYTGMLEDGKKVDSSRDRNKPFKF | |
| | AGAACATTCCCCAAAAGAGG | | MLGKQEVIRGWEEGVAQMSVGQRA | |
| | ACAGACTTGCGTCGTGCATT | | KLTISPDYAYGATGHPGIIPPHATLVF | |
| | ATACTGGAATGCTGGAAGAC | | DVELLKLE | |
| | GGCAAGAAGGTGGACAGCA | | | |
| | GCCGGGACCGAAACAAGCC | | | |
| | CTTCAAGTTCATGCTGGGGA | | | |
| | AGCAGGAAGTGATCCGGGG | | | |
| | CTGGGAGGAAGGAGTCGCA | | | |
| | CAGATGTCAGTGGGACAGAG | | | |
| | GGCCAAACTGACTATTAGCC | | | |
| | CAGACTACGCTTATGGAGCA | | | |
| | ACCGGCCACCCCGGGATCAT | | | |
| | TCCCCCTCATGCTACACTGG | | | |
| | TCTTCGATGTGGAGCTGCTG | | | |
| | AAGCTGGAA | | | |
| Linker | AGCGGAGGAGGATCCGGA | 483 | SGGGSG | 484 |
| ΔCaspase9 | GTGGACGGGTTTGGAGATGT | 485 | VDGFGDVGALESLRGNADLAYILSM | 486 |
| | GGGAGCCCTGGAATCCCTG | | EPCGHCLIINNVNFCRESGLRTRTGS | |
| | CGGGGCAATGCCGATCTGG | | NIDCEKLRRRFSSLHFMVEVKGDLTA | |
| | CTTACATCCTGTCTATGGAG | | KKMVLALLELARQDHGALDCCVVVIL | |
| | CCTTGCGGCCACTGTCTGAT | | SHGCQASHLQFPGAVYGTDGCPVS | |
| | CATTAACAATGTGAACTTCTG | | VEKIVNIFNGTSCPSLGGKPKLFFIQA | |
| | CAGAGAGAGCGGGCTGCGG | | CGGEQKDHGFEVASTSPEDESPGS | |
| | ACCAGAACAGGATCCAATAT | | NPEPDATPFQEGLRTFDQLDAISSLP | |
| | TGACTGTGAAAAGCTGCGGA | | TPSDIFVSYSTFPGFVSWRDPKSGS | |
| | GAAGGTTCTCTAGTCTGCAC | | WYVETLDDIFEQWAHSEDLQSLLLR | |
| | TTTATGGTCGAGGTGAAAGG | | VANAVSVKGIYKQMPGCFNFLRKKL | |
| | CGATCTGACCGCTAAGAAAA | | FFKTSASRA | |
| | TGGTGCTGGCCCTGCTGGAA | | | |
| | CTGGCTCGGCAGGACCATG | | | |
| | GGGCACTGGATTGCTGCGTG | | | |
| | GTCGTGATCCTGAGTCACGG | | | |
| | CTGCCAGGCTTCACATCTGC | | | |
| | AGTTCCCTGGGGCAGTCTAT | | | |
| | GGAACTGACGGCTGTCCAGT | | | |
| | CAGCGTGGAGAAGATCGTGA | | | |
| | ACATCTTCAACGGCACCTCT | | | |
| | TGCCCAAGTCTGGGCGGGA | | | |
| | AGCCCAAACTGTTCTTTATTC | | | |
| | AGGCCTGTGGAGGCGAGCA | | | |
| | GAAAGATCACGGCTTCGAAG | | | |
| | TGGCTAGCACCTCCCCCGAG | | | |
| | GACGAATCACCTGGAAGCAA | | | |
| | CCCTGAGCCAGATGCAACCC | | | |
| | CCTTCCAGGAAGGCCTGAGG | | | |
| | ACATTTGACCAGCTGGATGC | | | |
| | CATCTCAAGCCTGCCCACAC | | | |
| | CTTCTGACATTTTCGTCTCTT | | | |
| | ACAGTACTTTCCCTGGATTTG | | | |
| | TGAGCTGGCGCGATCCAAAG | | | |
| | TCAGGCAGCTGGTACGTGGA | | | |
| | GACACTGGACGATATCTTTG | | | |
| | AGCAGTGGGCCCATTCTGAA | | | |
| | GACCTGCAGAGTCTGCTGCT | | | |
| | GCGAGTGGCCAATGCTGTCT | | | |
| | CTGTGAAGGGGATCTACAAA | | | |
| | CAGATGCCAGGATGCTTCAA | | | |
| | CTTTCTGAGAAAGAAACTGTT | | | |
| | CTTTAAGACCTCCGCATCTA | | | |
| | GGGCC | | | |
| Linker | CCGCGG | 487 | PR | 488 |
| (SaclI) | | | | |
| T2A | GAGGGCAGGGGAAGTCTTCT | 489 | EGRGSLLTCGDVEENPGP | 490 |
| | AACATGCGGGGACGTGGAG | | | |
| | GAAAATCCCGGGCCC | | | |
| Linker | GCATGCGCCACC | 491 | ACAT | 492 |
| (NcoI) | | | | |
| Sig Peptide | ATGGAGTTTGGGTTGTCATG | 493 | MEFGLSWLFLVAILKGVQCSR | 494 |
| | GTTGTTTCTCGTCGCTATTCT | | | |
| | CAAAGGTGTACAATGCTCCC | | | |
| | GC | | | |
| FRP5- | GAAGTCCAATTGCAACAGTC | 495 | EVQLQQSGPELKKPGETVKISCKAS | 496 |
| VH(anti- | AGGCCCCGAATTGAAAAAGC | | GYPFTNYGMNWVKQAPGQGLKWM | |
| Her2) | CCGGCGAAACAGTGAAGATA | | GWINTSTGESTFADDFKGRFDFSLE | |
| | TCTTGTAAAGCCTCCGGTTA | | TSANTAYLQINNLKSEDMATYFCAR | |
| | CCCTTTTACGAACTATGGAAT | | WEVYHGYVPYWGQGTTVTVSS | |
| | GAACTGGGTCAAACAAGCCC | | | |
| | CTGGACAGGGATTGAAGTGG | | | |
| | ATGGGATGGATCAATACATC | | | |
| | AACAGGCGAGTCTACCTTCG | | | |
| | CAGATGATTTCAAAGGTCGC | | | |
| | TTTGACTTCTCACTGGAGAC | | | |
| | CAGTGCAAATACCGCCTACC | | | |
| | TTCAGATTAACAATCTTAAAA | | | |
| | GCGAGGATATGGCAACCTAC | | | |
| | TTTTGCGCAAGATGGGAAGT | | | |
| | TTATCACGGGTACGTGCCAT | | | |
| | ACTGGGGACAAGGAACGACA | | | |
| | GTGACAGTTAGTAGC | | | |
| Flex-linker | GGCGGTGGAGGCTCCGGTG | 497 | GGGGSGGGGSGGGGS | 498 |
| | GAGGCGGCTCTGGAGGAGG | | | |
| | AGGTTCA | | | |
| FRP5VL(anti- | GACATCCAATTGACACAATC | 499 | DIQLTQSHKFLSTSVGDRVSITCKAS | 500 |
| Her2) | ACACAAATTTCTCTCAACTTC | | QDVYNAVAWYQQKPGQSPKLLIYSA | |
| | TGTAGGAGACAGAGTGAGCA | | SSRYTGVPSRFTGSGSGPDFTFTISS | |
| | TAACCTGCAAAGCATCCCAG | | VQAEDLAVYFCQQHFRTPFTFGSGT | |
| | GACGTGTACAATGCTGTGGC | | KLEIKAL | |
| | TTGGTACCAACAGAAGCCTG | | | |
| | GACAATCCCCAAAATTGCTG | | | |
| | ATTTATTCTGCCTCTAGTAGG | | | |
| | TACACTGGGGTACCTTCTCG | | | |
| | GTTTACGGGCTCTGGGTCCG | | | |
| | GACCAGATTTCACGTTCACA | | | |
| | ATCAGTTCCGTTCAAGCTGA | | | |
| | AGACCTCGCTGTTTATTTTTG | | | |
| | CCAGCAGCACTTCCGAACCC | | | |
| | CTTTTACTTTTGGCTCAGGCA | | | |
| | CTAAGTTGGAAATCAAGGCT | | | |
| | TTG | | | |
| Linker(NsiI) | Atgcat | 501 | MH | 502 |
| CD34 | GAACTTCCTACTCAGGGGAC | 503 | ELPTQGTFSNVSTNVS | 504 |
| epitope | TTTCTCAAACGTTAGCACAAA | | | |
| | CGTAAGT | | | |
| CD8a stalk | CCCGCCCCAAGACCCCCCA | 505 | PAPRPPTPAPTIASQPLSLRPEACRP | 506 |
| | CACCTGCGCCGACCATTGCT | | AAGGAVHTRGLDFACD | |
| | TCTCAACCCCTGAGTTTGAG | | | |
| | ACCCGAGGCCTGCCGGCCA | | | |
| | GCTGCCGGCGGGGCCGTGC | | | |
| | ATACAAGAGGACTCGATTTC | | | |
| | GCTTGCGAC | | | |
| CD8tm + | ATCTATATCTGGGCACCTCT | 507 | IYIWAPLAGTCGVLLLSLVITLYCNHR | 508 |
| stop tf | CGCTGGCACCTGTGGAGTCC | | NRRRVCKCPR | |
| | TTCTGCTCAGCCTGGTTATTA | | | |
| | CTCTGTACTGTAATCACCGG | | | |
| | AATCGCCGCCGCGTTTGTAA | | | |
| | GTGTCCCAGG | | | |
| Linker | gtcgac | 509 | VD | 510 |
| (SalI) | | | | |
| MyD88 | ATGGCCGCTGGGGGCCCAG | 511 | MAAGGPGAGSAAPVSSTSSLPLAAL | 512 |
| | GCGCCGGATCAGCTGCTCC | | NMRVRRRLSLFLNVRTQVAADWTAL | |
| | CGTATCTTCTACTTCTTCTTT | | AEEMDFEYLEIRQLETQADPTGRLLD | |
| | GCCGCTGGCTGCTCTGAACA | | AWQGRPGASVGRLLDLLTKLGRDD | |
| | TGCGCGTGAGAAGACGCCTC | | VLLELGPSIEEDCQKYILKQQQEEAE | |
| | TCCCTGTTCCTTAACGTTCG | | KPLQVAAVDSSVPRTAELAGITTLDD | |
| | CACACAAGTCGCTGCCGATT | | PLGHMPERFDAFICYCPSDI | |
| | GGACCGCCCTTGCCGAAGAA | | | |
| | ATGGACTTTGAATACCTGGA | | | |
| | AATTAGACAACTTGAAACACA | | | |
| | GGCCGACCCCACTGGCAGA | | | |
| | CTCCTGGACGCATGGCAGG | | | |
| | GAAGACCTGGTGCAAGCGTT | | | |
| | GGACGGCTCCTGGATCTCCT | | | |
| | GACAAAACTGGGACGCGAC | | | |
| | GACGTACTGCTTGAACTCGG | | | |
| | ACCTAGCATTGAAGAAGACT | | | |
| | GCCAAAAATATATCCTGAAAC | | | |
| | AACAACAAGAAGAAGCCGAA | | | |
| | AAACCTCTCCAAGTCGCAGC | | | |
| | AGTGGACTCATCAGTACCCC | | | |
| | GAACAGCTGAGCTTGCTGGG | | | |
| | ATTACTACACTCGACGACCC | | | |
| | ACTCGGACATATGCCTGAAA | | | |
| | GATTCGACGCTTTCATTTGCT | | | |
| | ATTGCCCCTCTGACATA | | | |
| dCD40 | AAGAAAGTTGCAAAGAAACC | 513 | KKVAKKPTNKAPHPKQEPQEINFPD | 514 |
| | CACAAATAAAGCCCCACACC | | DLPGSNTAAPVQETLHGCQPVTQED | |
| | CTAAACAGGAACCCCAAGAA | | GKESRISVQERQ | |
| | ATCAATTTCCCAGATGATCTC | | | |
| | CCTGGATCTAATACTGCCGC | | | |
| | CCCGGTCCAAGAAACCCTGC | | | |
| | ATGGTTGCCAGCCTGTCACC | | | |
| | CAAGAGGACGGAAAAGAATC | | | |
| | ACGGATTAGCGTACAAGAGA | | | |
| | GACAA | | | |
| CD3z | AGAGTGAAGTTCAGCAGGAG | 515 | RVKFSRSADAPAYQQGQNQLYNEL | 516 |
| | CGCAGACGCCCCCGCGTAC | | NLGRREEYDVLDKRRGRDPEMGGK | |
| | CAGCAGGGCCAGAACCAGC | | PRRKNPQEGLYNELQKDKMAEAYS | |
| | TCTATAACGAGCTCAATCTAG | | EIGMKGERRRGKGHDGLYQGLSTAT | |
| | GACGAAGAGAGGAGTACGAT | | KDTYDALHMQALPPR* | |
| | GTTTTGGACAAGAGACGTGG | | | |
| | CCGGGACCCTGAGATGGGG | | | |
| | GGAAAGCCGAGAAGGAAGA | | | |
| | ACCCTCAGGAAGGCCTGTAC | | | |
| | AATGAACTGCAGAAAGATAA | | | |
| | GATGGCGGAGGCCTACAGT | | | |
| | GAGATTGGGATGAAAGGCGA | | | |
| | GCGCCGGAGGGGCAAGGGG | | | |
| | CACGATGGCCTTTACCAGGG | | | |
| | TCTCAGTACAGCCACCAAGG | | | |
| | ACACCTACGACGCCCTTCAC | | | |
| | ATGCAAGCTCTTCCACCTCG | | | |
| | Ttga | | | |

[0768] Methods discussed herein, including, but not limited to, methods for constructing vectors, assays for activity or function, administration to patients, transfecting or transforming cells, assay, and methods for monitoring patients may also be found in the following patents and patent applications, which are hereby incorporated by reference herein in their entirety.

[0769] U.S. patent application Ser. No. 14/210,034, titled METHODS FOR CONTROLLING T CELL PROLIFERATION, filed Mar. 13, 2014; U.S. patent application Ser. No. 13/112,739, filed May 20, 2011, issued as U.S. Pat. No. 9,089,520, Jul. 28, 2015, and entitled METHODS FOR INDUCING SELECTIVE APOPTOSIS; U.S. patent application Ser. No. 14/622,018, filed Feb. 13, 2014, titled METHODS FOR ACTIVATING T CELLS USING AN INDUCIBLE CHIMERIC POLYPEPTIDE; U.S. patent application Ser. No. 13/112,739, filed May 20, 2011, titled METHODS FOR INDUCING SELECTIVE APOPTOSIS; U.S. patent application Ser. No. 13/792,135, filed Mar. 10, 2013, titled MODIFIED CASPASE POLYPEPTIDES AND USES THEREOF; U.S. patent application Ser. No. 14/296,404, filed Jun. 4, 2014, titled METHODS FOR INDUCING PARTIAL APOPTOSIS USING CASPASE POLYPEPTIDES; U.S. Provisional Patent Application Ser. No. 62/044,885, filed Sep. 2, 2014, and U.S. patent application Ser. No. 14/842,710, filed Sep. 1, 2015, each titled COSTIMULATION OF CHIMERIC ANTIGEN RECEPTORS BY MyD88 AND CD40 POLYPEPTIDES; U.S. patent application Ser. No. 14/640,554, filed 6 Mar. 2015, titled CASPASE POLYPEPTIDES HAVING MODIFIED ACTIVITY AND USES THEREOF; U.S. Pat. No. 7,404,950, issued Jun. 29, 2008, to Spencer, D. et al., U.S. patent application Ser. No. 12/445,939 by Spencer, D., et al., filed Oct. 26, 2010; U.S. patent application Ser. No. 12/563,991 by Spencer, D., et al., filed Sep. 21, 2009; 13/087,329 by Slawin, K., et al., filed Apr. 14, 2011; 13/763,591 by Spencer, D., et al., filed Feb. 8, 2013; and International Patent Application Number PCT/US2014/022004, filed 7 Mar. 2014, published as PCT/US2014/022004 on 9 Oct. 2014, titled MODIFIED CASPASE POLYPEPTIDES AND USES THEREOF.

### Example 18: FRB-Based Scaffold Assembly and Activation of iCaspase-9

[0770] To determine if iCaspase-9 could be aggregated by tandem multimers of FRB_{L}, one to four tandem copies of FRB_{L} were subcloned into an expression vector, pSH1, driving transgene expression from an SRα promoter. A subset of constructs also contained the myristoylation-targeting domain from v-Src for membrane localization of the FRB-scaffold (FIG. 12A). 293 cells were transfected with the SRα-SEAP reporter plasmid along with FKBP12-ΔCaspase-9 (iCaspase-9/iC9), plus 1 of several FRB-based, non-myristoylated scaffold proteins containing 0, 1, or 4 tandem copies of FRB_{L}. Addition of either rapamycin or analog, C7-isopropoxy-rapamycin, created by the method of Luengo et al., (Luengo J I (95) Chem & Biol 2, 471-81. Luengo J I (94) J. Org Chem 59:6512-13), led to a diminution of reporter activity when the 4× FRB construct was present, consistent with cell death, as predicted (FIG. 8B, 10D, 10E) with a IC₅₀˜3 nM (FIG. 12B). Addition of rapamycin had no effect on reporter activity when only 1 (or 0) FRB domain was present, which would preclude oligomerization of iCasp9 (FIG. 10C). Similar results were obtained when the FRB-scaffold was myristoylated (FIG. 12C) to localize the scaffold to the plasma membrane. Thus, the Caspase-9 polypeptide can be activated with rapamycin or analogs when oligomerized on a FRB-based scaffold.

### Example 19: FKBP12-Based Scaffolds Assemble and Activate FRB-ΔCaspase-9

[0771] To determine if the polarity of heterodimerization and Caspase-9 assembly could be reversed, one to four 1 to 4 tandem copies of FKBP12 were subcloned into expression vector, pSH1, as above. (FIG. 13A). As above, 293 cells were transfected with the SRα-SEAP reporter plasmid along with FRBL-ΔCaspase-9, plus a non-myristoylated scaffold protein containing 1 or 4 tandem copies of FKBP12. Addition of either rapamycin or analog, C7-isopropoxy-rapamycin, led to a diminution of reporter activity when the 4×FRB_{L} construct was present, consistent with cell death with a IC₅₀˜3 nM (FIG. 13B). Addition of rapamycin had no effect on reporter activity when only 1 (or 0) FKBP domain was present, similar to the results in FIG. 12. Thus, Caspase-9 can be activated with rapamycin or analogs when oligomerized on a FRB or FKBP12-based scaffold.

### Example 20: FRB-Based Scaffold Assembly and Activation of iCaspase-9 in Primary T Cells

[0772] To determine if iCaspase-9 could be aggregated by tandem multimers of FRB_{L} in primary, non-transformed T cells, zero to three 3 tandem copies of FRB_{L} were subcloned into a retroviral expression vector, pBP0220-pSFG-iC9.T2A-ΔCD19, encoding Caspase-9 (iC9) along with a non-signaling truncated version of CD19 that served as a surface marker. The resulting unified plasmid vectors, named pBP0756-iC9.T2A-ΔCD19.P2A-FRB_{L}, pBP0755-iC9.T2A-ΔCD19.P2A-FRB_{L}2, and pBP0757-iC9.T2A-ΔCD19.P2A-FRB_{L}3, were subsequently used to make infectious γ-retroviruses (γ-RVs) encoding scaffolds of 1, 2 or 3 tandem FRB_{L} domains, respectively.

[0773] T cells from 3 different donors were transduced with the vectors and plated with varying rapamycin dilutions. After 24 and 48 hours, cell aliquots were harvested, stained with anti-CD19 APC and analyzed by flow cytometry. Cells were initially gated on live lymphocytes by FSC vs SSC and then plotted as a CD19 histogram and subgated for high, medium and low expression within the CD19⁺ gate. Line graphs were prepared to represent the relative percentage of the total cell population that express high levels of CD19, normalized to the no “0” drug control (FIG. 14). Similar to the surrogate SEAP reporter assay performed in transformed epithelial cells, as rapamycin concentration increased, the percentage of CD19hi cells decreased in cells expressing Caspase-9 and FRB_{L}2 or FRB_{L}3, but not in cells expressing Caspase-9 along with 0 or 1 FRB_{L} domains, indicating that rapamycin induces heterodimerization between the FRB-based scaffolds and iCaspase9, leading to Caspase-9 dimerization and cell death. Similar results were seen when rapamycin was replaced with C7-isopropoxyrapamycin.

### Example 21: FRB-Based Scaffolds Attached to Signaling Molecules can Dimerize and Activate iCaspase-9

[0774] To determine if multimers of FRB would still act as a recruitment scaffold to enable rapalog-mediated Caspase-9 dimerization when attached to another signaling domain, 1 or 2 FRB_{L} domains were fused to the potent chimeric stimulatory molecule, MyD88/CD40, to derive iMC.FRB_{L} (pBP0655) and iMC.FRB_{L}2 (pBP0498), respectively (FIG. 9B). As an initial test, 293 cells were transiently transfected with reporter plasmid SRα-SEAP, Caspase-9, a 1^{st} generation anti-HER2 CAR (pBP0488) and (pBP0655 or pBP0498) (FIG. 15). Control transfections contained Caspase-9 (pBP0044) alone or eGFP expression vector (pBP0047). In the presence of rimiducid, Caspase-9-containing cells, but not control eGFP-cells, were killed by Caspase-9 homodimerization as usual, reflected by diminution of SEAP activity (FIG. 15, left); however, rapamycin only triggered SEAP reduction in cells expressing iMC.FRB_{L}2 and Caspase-9, but not cells expressing iMC.FRB_{L} and Caspase-9, or control cells. Thus, heterodimerizer-mediated activation of Caspase-9 is possible in cells containing multimers of FRB_{L} fused to distinct proteins, such as MyD88/CD40.

[0775] In a second test for rapalog-mediated scaffold-based activation of Caspase-9, 293 cells were transiently transfected with SRα-SEAP reporter plasmid, plus myristoylated or non-myristoylated inducible iMC co-expressed with 1^{st} generation anti-CD19 CAR, plus FRB_{L}2-fused Caspase-9 (plasmid pBP0467) (FIG. 16). After 24 hours, cells were treated with log dilutions of rimiducid, rapamycin, or C7-isopropoxy (IsoP)-rapamycin. Unlike FKBP12-linked Caspase-9 (iC9), FRB_{L}2-Caspase-9 is not activated by rimiducid; however, it is activated by rapamycin or C7-isopropoxy-rapamycin when tandem FKBPs are present. Thus, rapamcyin and analogs can activate Caspase-9 via a molecular scaffold comprised of FRB or FKBP12 domains.

### Example 22: The iMC “Switch”, FKBPx2.MyD88.CD40, Creates a Scaffold for FRB_{L}2.Caspase9 in the Presence of Rapamycin to Induce Cell Death

[0776] The use of iMC as an FKBP12-based scaffold for activating FRB_{L}2-Caspase-9 was tested in primary T cells (FIG. 17). Primary T cells (2 donors) were transduced with γ-RVs derived from SFG-Δmyr.iMC.2A-CD19 (pBP0606) and SFG-FRB_{L}2.Caspase9.2A-Q.8stm.zeta (pBP0668). Transduced T cells were then plated with 5-fold dilutions of rapamycin. After 24 hours, cells were harvested and analyzed by flow cytometry for expression of iMC (via anti-CD19-APC), Caspase-9 (via anti-CD34-PE), and T cell identity (via anti-CD3-PerCPCy5.5). Cells were initially gated for lymphocyte morphology by FSC vs SSC, followed by CD3 expression (˜99% of lymphocytes).

[0777] To focus on doubly transduced cells, CD3⁺ lymphocytes were gated on CD19⁺ (ΔMyr.iMC.2A-CD19) and CD34⁺ (FRB) 2.Caspase9.2A-Q.8stm.zeta) expression. To normalize gated populations, percentages of CD34⁺CD19⁺ cells were divided by percent CD19⁺CD34⁻ cells within each sample as an internal control. Those values were then normalized to drug-free wells for each transduction, which were set at 100%. The results show rapid and efficient elimination of doubly transduced cells in the presence of relatively low (2 nM) levels of rapamycin (FIG. 17A, C). Similar analysis was applied to the Hi-, Med-, and Lo-expressing cells within the CD34⁺CD19⁺ gate (FIG. 17B). As rapamycin concentrations increase, percentage of CD34⁺CD19⁺ cells decrease, indicating elimination of cells. Finally, T cells from a single donor were transduced with ΔMyr.iMC.2A-CD19 (pBP0606) and FRB_{L}2.Caspase9.2A-Q.8stm.zeta (pBP0668) and plated in IL-2-containing media along with varying concentrations of rapamycin for 24 or 48 hrs. After 24 or 48 hrs, cells were harvested and analyzed by flow, as above. Interestingly, although elimination of cells expressing high levels of both transgenes was nearly complete at 24 hours, by 48 hours even cells expressing low levels of both transgenes are killed by rapamycin, showing the efficiency of the process in primary T cells (FIG. 17D).

### Example 23: Examples of Plasmids and Sequences Discussed in Examples 17-21

| | | | | |
|---|---|---|---|---|
| | | SEQ | | SEQ |
| | | ID | | ID |
| Fragment | Nucleotide | NO: | Peptide | NO: |

pBP0044: pSH1-iCaspase9wt

| | | | | |
|---|---|---|---|---|
| Linker | ATG-CTCGAG | 517 | MLE | 518 |
| FKBPv36 | GGAGTGCAGGTGGAgACtATCTCCCCA | 519 | GVQVETISPGDGRTFPKRGQTCVVHYTGMLED | 520 |
| | GGAGACGGGCGCACCTTCCCCAAGCG | | GKKVDSSRDRNKPFKFMLGKQEVIRGWEEGVA | |
| | CGGCCAGACCTGCGTGGTGCACTACA | | QMSVGQRAKLTISPDYAYGATGHPGIIPPHATL | |
| | CCGGGATGCTTGAAGATGGAAAGAAA | | VFDVELLKL | |
| | GTTGATTCCTCCCGGGACAGAAACAA | | | |
| | GCCCTTTAAGTTTATGCTAGGCAAGCA | | | |
| | GGAGGTGATCCGAGGCTGGGAAGAAG | | | |
| | GGGTTGCCCAGATGAGTGTGGGTCAG | | | |
| | AGAGCCAAACTGACTATATCTCCAGAT | | | |
| | TATGCCTATGGTGCCACTGGGCACCC | | | |
| | AGGCATCATCCCACCACATGCCACTCT | | | |
| | CGTCTTCGATGTGGAGCTTCTAAAACT | | | |
| | GGA | | | |
| Linker | ATCTGGCGGTGGATCCGGA | 521 | SGGGSG | 522 |
| ΔCaspase9 | GTCGACGGATTTGGTGATGTCGGTGC | 523 | VDGFGDVGALESLRGNADLAYILSMEPCGHCLII | 524 |
| | TCTTGAGAGTTTGAGGGGAAATGCAGA | | NNVNFCRESGLRTRTGSNIDCEKLRRRFSSLHF | |
| | TTTGGCTTACATCCTGAGCATGGAGCC | | MVEVKGDLTAKKMVLALLELARQDHGALDCCV | |
| | CTGTGGCCACTGCCTCATTATCAACAA | | VVILSHGCQASHLQFPGAVYGTDGCPVSVEKIV | |
| | TGTGAACTTCTGCCGTGAGTCCGGGC | | NIFNGTSCPSLGGKPKLFFIQACGGEQKDHGFE | |
| | TCCGCACCCGCACTGGCTCCAACATC | | VASTSPEDESPGSNPEPDATPFQEGLRTFDQL | |
| | GACTGTGAGAAGTTGCGGCGTCGCTT | | DAISSLPTPSDIFVSYSTFPGFVSWRDPKSGSW | |
| | CTCCTCGCTGCATTTCATGGTGGAGGT | | YVETLDDIFEQWAHSEDLQSLLLRVANAVSVKG | |
| | GAAGGGCGACCTGACTGCCAAGAAAA | | IYKQMPGCFNFLRKKLFFKTS | |
| | TGGTGCTGGCTTTGCTGGAGCTGGCG | | | |
| | CgGCAGGACCACGGTGCTCTGGACTG | | | |
| | CTGCGTGGTGGTCATTCTCTCTCACGG | | | |
| | CTGTCAGGCCAGCCACCTGCAGTTCC | | | |
| | CAGGGGCTGTCTACGGCACAGATGGA | | | |
| | TGCCCTGTGTCGGTCGAGAAGATTGT | | | |
| | GAACATCTTCAATGGGACCAGCTGCC | | | |
| | CCAGCCTGGGAGGGAAGCCCAAGCTC | | | |
| | TTTTTCATCCAGGCCTGTGGTGGGGA | | | |
| | GCAGAAAGACCATGGGTTTGAGGTGG | | | |
| | CCTCCACTTCCCCTGAAGACGAGTCC | | | |
| | CCTGGCAGTAACCCCGAGCCAGATGC | | | |
| | CACCCCGTTCCAGGAAGGTTTGAGGA | | | |
| | CCTTCGACCAGCTGGACGCCATATCTA | | | |
| | GTTTGCCCACACCCAGTGACATCTTTG | | | |
| | TGTCCTACTCTACTTTCCCAGGTTTTGT | | | |
| | TTCCTGGAGGGACCCCAAGAGTGGCT | | | |
| | CCTGGTACGTTGAGACCCTGGACGAC | | | |
| | ATCTTTGAGCAGTGGGCTCACTCTGAA | | | |
| | GACCTGCAGTCCCTCCTGCTTAGGGT | | | |
| | CGCTAATGCTGTTTCGGTGAAAGGGAT | | | |
| | TTATAAACAGATGCCTGGTTGCTTTAAT | | | |
| | TTCCTCCGGAAAAAACTTTTCTTTAAAA | | | |
| | CATCAGCTAGCAGAGCCGAGGGCAGG | | | |
| | GGAAGTCTTCTAACATGCGGGGACGT | | | |
| | GGAGGAAAATCCCGGGCCC-tga | | | |
| Linker | GCTAGCAGAGCC | 525 | ASRA | 526 |
| T2A | GAGGGCAGGGGAAGTCTTCTAACATG | 527 | EGRGSLLTCGDVEENPGP* | 528 |
| | CGGGGACGTGGAGGAAAATCCCGGG | | | |
| | CCC-tga | | | |

pBP0463--pSH1-Fpk-Fpk′.LS.Fpk′′.Fpk′′′.LS.HA

| | | | | |
|---|---|---|---|---|
| Linker | ATGCTCGAG | 529 | MLE | 530 |
| FRBI | TGGCATGAAGGGTTGGAAGAAGCTTC | 531 | GVQVETISPGDGRTFPKRGQTCVVHYTGMLED | 532 |
| | AAGGCTGTACTTCGGAGAGAGGAACG | | GKKFDSSRDRNKPFKFMLGKQEVIRGWEEGVA | |
| | TGAAGGGCATGTTTGAGGTTCTTGAAC | | QMSVGQRAKLTISPDYAYGATGHPPKIPPHATL | |
| | CTCTGCACGCCATGATGGAACGGGGA | | VFDVELLKLE | |
| | CCGCAGACACTGAAAGAAACCTCTTTT | | | |
| | AATCAGGCCTACGGCAGAGACCTGAT | | | |
| | GGAGGCCCAAGAATGGTGTAGAAAGT | | | |
| | ATATGAAATCCGGTAACGTGAAAGACC | | | |
| | TGCTCCAGGCCTGGGACCTTTATTACC | | | |
| | ATGTGTTCAGGCGGATCAGTAAG | | | |
| Linker | TCAGGCGGTGGCTCAGGTGTCGAG | 533 | SGGGSGVD | 534 |
| Δ-Caspase9 | GTCGACGGATTTGGTGATGTCGGTGC | 535 | DGFGDVGALESLRGNADLAYILSMEPCGHCLIIN | 536 |
| | TCTTGAGAGTTTGAGGGGAAATGCAGA | | NVNFCRESGLRTRTGSNIDCEKLRRRFSSLHFM | |
| | TTTGGCTTACATCCTGAGCATGGAGCC | | VEVKGDLTAKKMVLALLELARQDHGALDCCVV | |
| | CTGTGGCCACTGCCTCATTATCAACAA | | VILSHGCQASHLQFPGAVYGTDGCPVSVEKIVN | |
| | TGTGAACTTCTGCCGTGAGTCCGGGC | | IFNGTSCPSLGGKPKLFFIQACGGEQKDHGFEV | |
| | TCCGCACCCGCACTGGCTCCAACATC | | ASTSPEDESPGSNPEPDATPFQEGLRTFDQLD | |
| | GACTGTGAGAAGTTGCGGCGTCGCTT | | AISSLPTPSDIFVSYSTFPGFVSWRDPKSGSWY | |
| | CTCCTCGCTGCATTTCATGGTGGAGGT | | VETLDDIFEQWAHSEDLQSLLLRVANAVSVKGI | |
| | GAAGGGCGACCTGACTGCCAAGAAAA | | YKQMPGCFNFLRKKLFFKTSASRA | |
| | TGGTGCTGGCTTTGCTGGAGCTGGCG | | | |
| | CgGCAGGACCACGGTGCTCTGGACTG | | | |
| | CTGCGTGGTGGTCATTCTCTCTCACGG | | | |
| | CTGTCAGGCCAGCCACCTGCAGTTCC | | | |
| | CAGGGGCTGTCTACGGCACAGATGGA | | | |
| | TGCCCTGTGTCGGTCGAGAAGATTGT | | | |
| | GAACATCTTCAATGGGACCAGCTGCCC | | | |
| | CAGCCTGGGAGGGAAGCCCAAGCTCT | | | |
| | TTTTCATCCAGGCCTGTGGTGGGGAG | | | |
| | CAGAAAGACCATGGGTTTGAGGTGGC | | | |
| | CTCCACTTCCCCTGAAGACGAGTCCCC | | | |
| | TGGCAGTAACCCCGAGCCAGATGCCA | | | |
| | CCCCGTTCCAGGAAGGTTTGAGGACC | | | |
| | TTCGACCAGCTGGACGCCATATCTAGT | | | |
| | TTGCCCACACCCAGTGACATCTTTGTG | | | |
| | TCCTACTCTACTTTCCCAGGTTTTGTTT | | | |
| | CCTGGAGGGACCCCAAGAGTGGCTCC | | | |
| | TGGTACGTTGAGACCCTGGACGACAT | | | |
| | CTTTGAGCAGTGGGCTCACTCTGAAGA | | | |
| | CCTGCAGTCCCTCCTGCTTAGGGTCG | | | |
| | CTAATGCTGTTTCGGTGAAAGGGATTT | | | |
| | ATAAACAGATGCCTGGTTGCTTTAATTT | | | |
| | CCTCCGGAAAAAACTTTTCTTTAAAACA | | | |
| | TCAGCTAGCAGAGCC | | | |
| T2A | GAGGGCAGGGGAAGTCTTCTAACATG | 537 | EGRGSLLTCGDVEENPGP | 538 |
| | CGGGGACGTGGAGGAAAATCCCGGGC | | | |
| | CCtga | | | |

pBP0725--pSH1-FRBI.FRBI′.LS.FRBI′′.FRBI′′′

| | | | | |
|---|---|---|---|---|
| FRBI | ATGctcgagTGGCATGAAGGCCTGGAAG | 539 | MLEWHEGLEEASRLYFGERNVKGMFEVLEPLH | 540 |
| | AGGCATCTCGTTTGTACTTTGGGGAAA | | AMMERGPQTLKETSFNQAYGRDLMEAQEWCR | |
| | GGAACGTGAAAGGCATGTTTGAGGTG | | KYMKSGNVKDLLQAWDLYYHVFRRISK | |
| | CTGGAGCCCTTGCACGCTATGATGGA | | | |
| | ACGGGGCCCCCAGACTCTGAAGGAAA | | | |
| | CATCCTTTAATCAGGCCTATGGTCGAG | | | |
| | ATTTAATGGAGGCCCAAGAGTGGTGCA | | | |
| | GGAAGTACATGAAATCAGGGAATGTCA | | | |
| | AGGACCTCCTCCAAGCCTGGGACCTC | | | |
| | TATTATCATGTGTTCCGACGAATCTCAA | | | |
| | AG | | | |
| Linker | gtcgag | 541 | VD | 542 |
| FRBI′ | TGGCATGAAGGGTTGGAAGAAGCTTC | 543 | WHEGLEEASRLYFGERNVKGMFEVLEPLHAM | 544 |
| | AAGGCTGTACTTCGGAGAGAGGAACG | | MERGPQTLKETSFNQAYGRDLMEAQEWCRKY | |
| | TGAAGGGCATGTTTGAGGTTCTTGAAC | | MKSGNVKDLLQAWDLYYHVFRRISK | |
| | CTCTGCACGCCATGATGGAACGGGGA | | | |
| | CCGCAGACACTGAAAGAAACCTCTTTT | | | |
| | AATCAGGCCTACGGCAGAGACCTGAT | | | |
| | GGAGGCCCAAGAATGGTGTAGAAAGT | | | |
| | ATATGAAATCCGGTAACGTGAAAGACC | | | |
| | TGCTCCAGGCCTGGGACCTTTATTACC | | | |
| | ATGTGTTCAGGCGGATCAGTAAG | | | |
| Linker | TCAGGCGGTGGCTCAGGTGTCGAG | 545 | SGGGSGVD | 546 |
| FRBI′′ | TGGCATGAAGGCCTGGAAGAGGCATC | 547 | WHEGLEEASRLYFGERNVKGMFEVLEPLHAM | 548 |
| | TCGTTTGTACTTTGGGGAAAGGAACGT | | MERGPQTLKETSFNQAYGRDLMEAQEWCRKY | |
| | GAAAGGCATGTTTGAGGTGCTGGAGC | | MKSGNVKDLLQAWDLYYHVFRRISK | |
| | CCTTGCACGCTATGATGGAACGGGGC | | | |
| | CCCCAGACTCTGAAGGAAACATCCTTT | | | |
| | AATCAGgCCTATGGTCGAGATTTAATG | | | |
| | GAGGCCCAAGAGTGGIGCAGGAAGTA | | | |
| | CATGAAATCAGGGAATGTCAAGGACCT | | | |
| | CCTCCAAGCCTGGGACCTCTATTATCA | | | |
| | TGTGTTCCGACGAATCTCAAAG | | | |
| Linker | GTCGAC | 549 | VD | 550 |
| FRBI′′′ | TGGCATGAAGGGTTGGAAGAAGCTTC | 551 | WHEGLEEASRLYFGERNVKGMFEVLEPLHAM | 552 |
| | AAGGCTGTACTTCGGAGAGAGGAACG | | MERGPQTLKETSFNQAYGRDLMEAQEWCRKY | |
| | TGAAGGGCATGTTTGAGGTTCTTGAAC | | MKSGNVKDLLQAWDLYYHVFRRISK | |
| | CTCTGCACGCCATGATGGAACGGGGA | | | |
| | CCGCAGACACTGAAAGAAACCTCTTTT | | | |
| | AATCAGGCCTACGGCAGAGACCTGAT | | | |
| | GGAGGCCCAAGAATGGTGTaGAAAGT | | | |
| | ATATGAAATCCGGTAACGTGAAAGACC | | | |
| | TGCTCCAGGCCTGGGACCTTTATTACC | | | |
| | ATGTGTTCAGGCGGATCAGTAAGTCAG | | | |
| | GCGGTGGCTCAGGTGTCGAC | | | |
| Linker | GTCGAC | 553 | VE | 554 |
| HA tag | TATCCGTACGACGTACCAGACTACGCA | 555 | YPYDVPDYALD* | 556 |
| | CTCGACTAA | | | |

pBP0465--pSH1-M-FRBI.FRBI′.LS.HA

| | | | | |
|---|---|---|---|---|
| Myr | atgggctgtgtgcaatgtaaggataaagaagcaacaa | 557 | MGCVQCKDKEATKLTEE | 558 |
| | aactgacggaggag | | | |
| Linker | CTCGAG | 559 | LG | 560 |
| FRBI | TGGCATGAAGGCCTGGAAGAGGCATC | 561 | MLEWHEGLEEASRLYFGERNVKGMFEVLEPLH | 562 |
| | TCGTTTGTACTTTGGGGAAAGGAACGT | | AMMERGPQTLKETSFNQAYGRDLMEAQEWCR | |
| | GAAAGGCATGTTTGAGGTGCTGGAGC | | KYMKSGNVKDLLQAWDLYYHVFRRISK | |
| | CCTTGCACGCTATGATGGAACGGGGC | | | |
| | CCCCAGACTCTGAAGGAAACATCCTTT | | | |
| | AATCAGGCCTATGGTCGAGATTTAATG | | | |
| | GAGGCCCAAGAGTGGTGCAGGAAGTA | | | |
| | CATGAAATCAGGGAATGTCAAGGACCT | | | |
| | CCTCCAAGCCTGGGACCTCTATTATCA | | | |
| | TGTGTTCCGACGAATCTCAAAG | | | |
| Linker | gtcgag | 563 | VD | 564 |
| FRBI′ | TGGCATGAAGGGTTGGAAGAAGCTTC | 565 | WHEGLEEASRLYFGERNVKGMFEVLEPLHAM | 566 |
| | AAGGCTGTACTTCGGAGAGAGGAACG | | MERGPQTLKETSFNQAYGRDLMEAQEWCRKY | |
| | TGAAGGGCATGTTTGAGGTTCTTGAAC | | MKSGNVKDLLQAWDLYYHVFRRISK | |
| | CTCTGCACGCCATGATGGAACGGGGA | | | |
| | CCGCAGACACTGAAAGAAACCTCTTTT | | | |
| | AATCAGGCCTACGGCAGAGACCTGAT | | | |
| | GGAGGCCCAAGAATGGTGTAGAAAGT | | | |
| | ATATGAAATCCGGTAACGTGAAAGACC | | | |
| | TGCTCCAGGCCTGGGACCTTTATTACC | | | |
| | ATGTGTTCAGGCGGATCAGTAAG | | | |
| Linker | TCAGGCGGTGGCTCAGGTG | 567 | SGGGSGVD | 568 |
| HA tag | tatccgtacgacgtaccagactacgcactcgactaa | 569 | YPYDVPDYALD* | 570 |

pBP0722--pSH1-Fpk-Fpk′.LS.Fpk′′.Fpk′′′.LS.HA

| | | | | |
|---|---|---|---|---|
| Linker | ATGCTCGAG | 571 | MLE | 572 |
| FKBPpk | GGcGTcCAaGTcGAaACcATtagtCCcGGc | 573 | GVQVETISPGDGRTFPKRGQTCVVHYTGMLED | 574 |
| | GAtGGcaGaACaTTtCCtAAaaGgGGaCAa | | GKKFDSSRDRNKPFKFMLGKQEVIRGWEEGVA | |
| | ACaTGtGTcGTcCAtTAtACaGGcATGtTgG | | QMSVGQRAKLTISPDYAYGATGHPPKIPPHATL | |
| | AgGAcGGcAAaAAgttcGAcagtagtaGaGAtc | | VFDVELLKLE | |
| | GcAAtAAaCCtTTcAAaTTcATGtTgGGaAA | | | |
| | aCAaGAaGTcATtaGgGGaTGGGAgGAgG | | | |
| | GcGTgGCtCAaATGtccGTcGGcCAacGcG | | | |
| | CtAAgCTcACcATcagcCCcGAcTAcGCaT | | | |
| | AcGGcGCtACcGGaCAtCCccctaagATtCC | | | |
| | cCCtCAcGCtACctTgGTgTTtGAcGTcGAa | | | |
| | CTgtTgAAgCTcGAa | | | |
| Linker | gtcgag | 575 | VD | 576 |
| FKBPpk′ | ggagtgcaggtggagactatctccccaggagacgggc | 577 | GVQVETISPGDGRTFPKRGQTCVVHYTGMLED | 578 |
| | gcaccttccccaagcgcggccagacctgcgtggtgcac | | GKKFDSSRDRNKPFKFMLGKQEVIRGWEEGVA | |
| | tacaccgggatgcttgaagatggaaagaaattcgattcc | | QMSVGQRAKLTISPDYAYGATGHPPKIPPHATL | |
| | tctcgggacagaaacaagccctttaagtttatgctaggc | | VFDVELLKLE | |
| | aagcaggaggtgatccgaggctgggaagaaggggtt | | | |
| | gcccagatgagtgtgggtcagagagccaaactgactata | | | |
| | tctccagattatgcctatggtgccactgggcacccacct | | | |
| | aagatcccaccacatgccactctcgtcttcgatgtggag | | | |
| | cttctaaaactggaa | | | |
| Linker | TCAGGCGGTGGCTCAGGTGTCGAG | 579 | SGGGSGVD | 580 |
| FKBPpk′′ | GGcGTcCAaGTcGAaACcATtagtCCcGGc | 581 | GVQVETISPGDGRTFPKRGQTCVVHYTGMLED | 582 |
| | GAtGGcaGaACaTTtCCtAAaaGgGGaCAa | | GKKFDSSRDRNKPFKFMLGKQEVIRGWEEGVA | |
| | ACaTGtGTcGTcCAtTAtACaGGcATGtTgG | | QMSVGQRAKLTISPDYAYGATGHPPKIPPHATL | |
| | AgGAcGGcAAaAAgttcGAcagtagtaGaGAtc | | VFDVELLKLE | |
| | GcAAtAAaCCtTTcAAaTTcATGtTgGGaAA | | | |
| | aCAaGAaGTcATtaGgGGaTGGGAgGAgG | | | |
| | GcGTgGCtCAaATGtccGTcGGcCAacGcG | | | |
| | CtAAgCTcACcATcagcCCcGAcTAcGCaT | | | |
| | AcGGcGCtACcGGaCAtCCccctaagATtCC | | | |
| | cCCtCAcGCtACctTgGTgTTIGAcGTcGAa | | | |
| | CTgtTgAAgCTcGAa | | | |
| Linker | GTCGAC | 583 | VD | 584 |
| FKBPpk′′′ | ggagtgcaggtggagactatctccccaggagacgggc | 585 | GVQVETISPGDGRTFPKRGQTCVVHYTGMLED | 586 |
| | gcaccttccccaagcgcggccagacctgcgtggtgcac | | GKKFDSSRDRNKPFKFMLGKQEVIRGWEEGVA | |
| | tacaccgggatgcttgaagatggaaagaaattcgattcc | | QMSVGQRAKLTISPDYAYGATGHPPKIPPHATL | |
| | tctcgggacagaaacaagccctttaagtttatgctaggc | | VFDVELLKLE | |
| | aagcaggaggtgatccgaggctgggaagaaggggtt | | | |
| | gcccagatgagtgtgggtcagagagccaaactgactata | | | |
| | tctccagattatgcctatggtgccactgggcacccacct | | | |
| | aagatcccaccacatgccactctcgtcttcgatgtggag | | | |
| | cttctaaaactggaa | | | |
| Linker | TCAGGCGGTGGCTCAGGTGTCGAG | 587 | SGGGSGVD | 588 |
| HA tag | TATCCGTACGACGTACCAGACTACGCA | 589 | YPYDVPDYALD* | 590 |
| | CTCGACTAA | | | |

pBP0220--pSFG-iC9.T2A-ΔCD19

| | | | | |
|---|---|---|---|---|
| FKBP12v36 | ATGCTCGAGGGAGTGCAGGTGGAGACT | 591 | MLEGVQVETISPGDGRTFPKRGQTCVVHYT | 592 |
| | ATCTCCCCAGGAGACGGGCGCACCTTC | | GMLEDGKKVDSSRDRNKPFKFMLGKQEVIR | |
| | CCCAAGCGCGGCCAGACCTGCGTGGTG | | GWEEGVAQMSVGQRAKLTISPDYAYGATGH | |
| | CACTACACCGGGATGCTTGAAGATGGA | | PGIIPPHATLVFDVELLKLE | |
| | AAGAAAGTTGATTCCTCCCGGGACAGAA | | | |
| | ACAAGCCCTTTAAGTTTATGCTAGGCAA | | | |
| | GCAGGAGGTGATCCGAGGCTGGGAAGA | | | |
| | AGGGGTTGCCCAGATGAGTGTGGGTCA | | | |
| | GAGAGCCAAACTGACTATATCTCCAGAT | | | |
| | TATGCCTATGGTGCCACTGGGCACCCA | | | |
| | GGCATCATCCCACCACATGCCACTCTCG | | | |
| | TCTTCGATGTGGAGCTTCTAAAACTGGA | | | |
| | A | | | |
| Linker | TCTGGCGGTGGATCCGGA | 593 | SGGGSG | 594 |
| ΔCaspase9 | GTCGACGGATTTGGTGATGTCGGTGCT | 595 | VDGFGDVGALESLRGNADLAYILSMEPCGH | 596 |
| | CTTGAGAGTTTGAGGGGAAATGCAGATT | | CLIINNVNFCRESGLRTRTGSNIDCEKLRRRF | |
| | TGGCTTACATCCTGAGCATGGAGCCCT | | SSLHFMVEVKGDLTAKKMVLALLELARQDHG | |
| | GTGGCCACTGCCTCATTATCAACAATGT | | ALDCCVVVILSHGCQASHLQFPGAVYGTDG | |
| | GAACTTCTGCCGTGAGTCCGGGCTCCG | | CPVSVEKIVNIFNGTSCPSLGGKPKLFFIQAC | |
| | CACCCGCACTGGCTCCAACATCGACTG | | GGEQKDHGFEVASTSPEDESPGSNPEPDAT | |
| | TGAGAAGTTGCGGCGTCGCTTCTCCTC | | PFQEGLRTFDQLDAISSLPTPSDIFVSYSTFP | |
| | GCTGCATTTCATGGTGGAGGTGAAGGG | | GFVSWRDPKSGSWYVETLDDIFEQWAHSED | |
| | CGACCTGACTGCCAAGAAAATGGTGCT | | LQSLLLRVANAVSVKGIYKQMPGCFNFLRKK | |
| | GGCTTTGCTGGAGCTGGCGCGGCAGGA | | LFFKTSASRA | |
| | CCACGGTGCTCTGGACTGCTGCGTGGT | | | |
| | GGTCATTCTCTCTCACGGCTGTCAGGCC | | | |
| | AGCCACCTGCAGTTCCCAGGGGCTGTC | | | |
| | TACGGCACAGATGGATGCCCTGTGTCG | | | |
| | GTCGAGAAGATTGTGAACATCTTCAATG | | | |
| | GGACCAGCTGCCCCAGCCTGGGAGGG | | | |
| | AAGCCCAAGCTCTTTTTCATCCAGGCCT | | | |
| | GTGGTGGGGAGCAGAAAGACCATGGGT | | | |
| | TTGAGGTGGCCTCCACTTCCCCTGAAGA | | | |
| | CGAGTCCCCTGGCAGTAACCCCGAGCC | | | |
| | AGATGCCACCCCGTTCCAGGAAGGTTT | | | |
| | GAGGACCTTCGACCAGCTGGACGCCAT | | | |
| | ATCTAGTTTGCCCACACCCAGTGACATC | | | |
| | TTTGTGTCCTACTCTACTTTCCCAGGTTT | | | |
| | TGTTTCCTGGAGGGACCCCAAGAGTGG | | | |
| | CTCCTGGTACGTTGAGACCCTGGACGA | | | |
| | CATCTTTGAGCAGTGGGCTCACTCTGAA | | | |
| | GACCTGCAGTCCCTCCTGCTTAGGGTC | | | |
| | GCTAATGCTGTTTCGGTGAAAGGGATTT | | | |
| | ATAAACAGATGCCTGGTTGCTTTAATTTC | | | |
| | CTCCGGAAAAAACTTTTCTTTAAAACATC | | | |
| | AGCTAGCAGAGCC | | | |
| T2A | GAGGGCAGGGGAAGTCTTCTAACATGC | 597 | EGRGSLLTCGDVEENPGP | 598 |
| | GGGGACGTGGAGGAAAATCCCGGGCC | | | |
| | C | | | |
| ΔCD19 | ATGCCACCTCCTCGCCTCCTCTTCTTCC | 599 | MPPPRLLFFLLFLTPMEVRPEEPLVVKVEEG | 600 |
| | TCCTCTTCCTCACCCCCATGGAAGTCAG | | DNAVLQCLKGTSDGPTQQLTWSRESPLKPF | |
| | GCCCGAGGAACCTCTAGTGGTGAAGGT | | LKLSLGLPGLGIHMRPLAIWLFIFNVSQQMGG | |
| | GGAAGAGGGAGATAACGCTGTGCTGCA | | FYLCQPGPPSEKAWQPGWTVNVEGSGELF | |
| | GTGCCTCAAGGGGACCTCAGATGGCCC | | RWNVSDLGGLGCGLKNRSSEGPSSPSGKL | |
| | CACTCAGCAGCTGACCTGGTCTCGGGA | | MSPKLYVWAKDRPEIWEGEPPCLPPRDSLN | |
| | GTCCCCGCTTAAACCCTTCTTAAAACTC | | QSLSQDLTMAPGSTLWLSCGVPPDSVSRGP | |
| | AGCCTGGGGCTGCCAGGCCTGGGAATC | | LSWTHVHPKGPKSLLSLELKDDRPARDMWV | |
| | CACATGAGGCCCCTGGCCATCTGGCTT | | METGLLLPRATAQDAGKYYCHRGNLTMSFH | |
| | TTCATCTTCAACGTCTCTCAACAGATGG | | LEITARPVLWHWLLRTGGWKVSAVTLAYLIF | |
| | GGGGCTTCTACCTGTGCCAGCCGGGGC | | CLCSLVGILHLQRALVLRRKRKRMTDPTRRF* | |
| | CCCCCTCTGAGAAGGCCTGGCAGCCTG | | | |
| | GCTGGACAGTCAATGTGGAGGGCAGCG | | | |
| | GGGAGCTGTTCCGGTGGAATGTTTCGG | | | |
| | ACCTAGGTGGCCTGGGCTGTGGCCTGA | | | |
| | AGAACAGGTCCTCAGAGGGCCCCAGCT | | | |
| | CCCCTTCCGGGAAGCTCATGAGCCCCA | | | |
| | AGCTGTATGTGTGGGCCAAAGACCGCC | | | |
| | CTGAGATCTGGGAGGGAGAGCCTCCGT | | | |
| | GTCTCCCACCGAGGGACAGCCTGAACC | | | |
| | AGAGCCTCAGCCAGGACCTCACCATGG | | | |
| | CCCCTGGCTCCACACTCTGGCTGTCCT | | | |
| | GTGGGGTACCCCCTGACTCTGTGTCCA | | | |
| | GGGGCCCCCTCTCCTGGACCCATGTGC | | | |
| | ACCCCAAGGGGCCTAAGTCATTGCTGA | | | |
| | GCCTAGAGCTGAAGGACGATCGCCCGG | | | |
| | CCAGAGATATGTGGGTAATGGAGACGG | | | |
| | GTCTGTTGTTGCCCCGGGCCACAGCTC | | | |
| | AAGACGCTGGAAAGTATTATTGTCACCG | | | |
| | TGGCAACCTGACCATGTCATTCCACCTG | | | |
| | GAGATCACTGCTCGGCCAGTACTATGG | | | |
| | CACTGGCTGCTGAGGACTGGTGGCTGG | | | |
| | AAGGTCTCAGCTGTGACTTTGGCTTATC | | | |
| | TGATCTTCTGCCTGTGTTCCCTTGTGGG | | | |
| | CATTCTTCATCTTCAAAGAGCCCTGGTC | | | |
| | CTGAGGAGGAAAAGAAAGCGAATGACT | | | |
| | GACCCCACCAGGAGATTCTAA | | | |

pBP0756--pSFG-iC9.T2A-dCD19.P2A-FRB_{I}

| | | | | |
|---|---|---|---|---|
| FKBP12v36 | ATGCTCGAGGGAGTGCAGGTGGAGACT | 601 | MLEGVQVETISPGDGRTFPKRGQTCVVHYT | 602 |
| | ATCTCCCCAGGAGACGGGCGCACCTTC | | GMLEDGKKVDSSRDRNKPFKFMLGKQEVIR | |
| | CCCAAGCGCGGCCAGACCTGCGTGGTG | | GWEEGVAQMSVGQRAKLTISPDYAYGATGH | |
| | CACTACACCGGGATGCTTGAAGATGGA | | PGIIPPHATLVFDVELLKLE | |
| | AAGAAAGTTGATTCCTCCCGGGACAGAA | | | |
| | ACAAGCCCTTTAAGTTTATGCTAGGCAA | | | |
| | GCAGGAGGTGATCCGAGGCTGGGAAGA | | | |
| | AGGGGTTGCCCAGATGAGTGTGGGTCA | | | |
| | GAGAGCCAAACTGACTATATCTCCAGAT | | | |
| | TATGCCTATGGTGCCACTGGGCACCCA | | | |
| | GGCATCATCCCACCACATGCCACTCTCG | | | |
| | TCTTCGATGTGGAGCTTCTAAAACTGGA | | | |
| | A | | | |
| Linker | TCTGGCGGTGGATCCGGA | 603 | SGGGSG | 604 |
| dCaspase9 | GTCGACGGATTTGGTGATGTCGGTGCT | 605 | VDGFGDVGALESLRGNADLAYILSMEPCGH | 606 |
| | CTTGAGAGTTTGAGGGGAAATGCAGATT | | CLIINNVNFCRESGLRTRTGSNIDCEKLRRRF | |
| | TGGCTTACATCCTGAGCATGGAGCCCT | | SSLHFMVEVKGDLTAKKMVLALLELARQDHG | |
| | GTGGCCACTGCCTCATTATCAACAATGT | | ALDCCVVVILSHGCQASHLQFPGAVYGTDG | |
| | GAACTTCTGCCGTGAGTCCGGGCTCCG | | CPVSVEKIVNIFNGTSCPSLGGKPKLFFIQAC | |
| | CACCCGCACTGGCTCCAACATCGACTG | | GGEQKDHGFEVASTSPEDESPGSNPEPDAT | |
| | TGAGAAGTTGCGGCGTCGCTTCTCCTC | | PFQEGLRTFDQLDAISSLPTPSDIFVSYSTFP | |
| | GCTGCATTTCATGGTGGAGGTGAAGGG | | GFVSWRDPKSGSWYVETLDDIFEQWAHSED | |
| | CGACCTGACTGCCAAGAAAATGGTGCT | | LQSLLLRVANAVSVKGIYKQMPGCFNFLRKK | |
| | GGCTTTGCTGGAGCTGGCGCGGCAGGA | | LFFKTSASRA | |
| | CCACGGTGCTCTGGACTGCTGCGTGGT | | | |
| | GGTCATTCTCTCTCACGGCTGTCAGGCC | | | |
| | AGCCACCTGCAGTTCCCAGGGGCTGTC | | | |
| | TACGGCACAGATGGATGCCCTGTGTCG | | | |
| | GTCGAGAAGATTGTGAACATCTTCAATG | | | |
| | GGACCAGCTGCCCCAGCCTGGGAGGG | | | |
| | AAGCCCAAGCTCTTTTTCATCCAGGCCT | | | |
| | GTGGTGGGGAGCAGAAAGACCATGGGT | | | |
| | TTGAGGTGGCCTCCACTTCCCCTGAAGA | | | |
| | CGAGTCCCCTGGCAGTAACCCCGAGCC | | | |
| | AGATGCCACCCCGTTCCAGGAAGGTTT | | | |
| | GAGGACCTTCGACCAGCTGGACGCCAT | | | |
| | ATCTAGTTTGCCCACACCCAGTGACATC | | | |
| | TTTGTGTCCTACTCTACTTTCCCAGGTTT | | | |
| | TGTTTCCTGGAGGGACCCCAAGAGTGG | | | |
| | CTCCTGGTACGTTGAGACCCTGGACGA | | | |
| | CATCTTTGAGCAGTGGGCTCACTCTGAA | | | |
| | GACCTGCAGTCCCTCCTGCTTAGGGTC | | | |
| | GCTAATGCTGTTTCGGTGAAAGGGATTT | | | |
| | ATAAACAGATGCCTGGTTGCTTTAATTTC | | | |
| | CTCCGGAAAAAACTTTTCTTTAAAACATC | | | |
| | AGCTAGCAGAGCC | | | |
| T2A | GAGGGCAGGGGAAGTCTTCTAACATGC | 607 | EGRGSLLTCGDVEENPGP | 608 |
| | GGGGACGTGGAGGAAAATCCCGGGCC | | | |
| | C | | | |
| dCD19 | ATGCCACCTCCTCGCCTCCTCTTCTTCC | 609 | MPPPRLLFFLLFLTPMEVRPEEPLVVKVEEG | 610 |
| | TCCTCTTCCTCACCCCCATGGAAGTCAG | | DNAVLQCLKGTSDGPTQQLTWSRESPLKPF | |
| | GCCCGAGGAACCTCTAGTGGTGAAGGT | | LKLSLGLPGLGIHMRPLAIWLFIFNVSQQMGG | |
| | GGAAGAGGGAGATAACGCTGTGCTGCA | | FYLCQPGPPSEKAWQPGWTVNVEGSGELF | |
| | GTGCCTCAAGGGGACCTCAGATGGCCC | | RWNVSDLGGLGCGLKNRSSEGPSSPSGKL | |
| | CACTCAGCAGCTGACCTGGTCTCGGGA | | MSPKLYVWAKDRPEIWEGEPPCLPPRDSLN | |
| | GTCCCCGCTTAAACCCTTCTTAAAACTC | | QSLSQDLTMAPGSTLWLSCGVPPDSVSRGP | |
| | AGCCTGGGGCTGCCAGGCCTGGGAATC | | LSWTHVHPKGPKSLLSLELKDDRPARDMWV | |
| | CACATGAGGCCCCTGGCCATCTGGCTT | | METGLLLPRATAQDAGKYYCHRGNLTMSFH | |
| | TTCATCTTCAACGTCTCTCAACAGATGG | | LEITARPVLWHWLLRTGGWKVSAVTLAYLIF | |
| | GGGGCTTCTACCTGTGCCAGCCGGGGC | | CLCSLVGILHLQRALVLRRKRKRMTDPTRRF | |
| | CCCCCTCTGAGAAGGCCTGGCAGCCTG | | | |
| | GCTGGACAGTCAATGTGGAGGGCAGCG | | | |
| | GGGAGCTGTTCCGGTGGAATGTTTCGG | | | |
| | ACCTAGGTGGCCTGGGCTGTGGCCTGA | | | |
| | AGAACAGGTCCTCAGAGGGCCCCAGCT | | | |
| | CCCCTTCCGGGAAGCTCATGAGCCCCA | | | |
| | AGCTGTATGTGTGGGCCAAAGACCGCC | | | |
| | CTGAGATCTGGGAGGGAGAGCCTCCGT | | | |
| | GTCTCCCACCGAGGGACAGCCTGAACC | | | |
| | AGAGCCTCAGCCAGGACCTCACCATGG | | | |
| | CCCCTGGCTCCACACTCTGGCTGTCCT | | | |
| | GTGGGGTACCCCCTGACTCTGTGTCCA | | | |
| | GGGGCCCCCTCTCCTGGACCCATGTGC | | | |
| | ACCCCAAGGGGCCTAAGTCATTGCTGA | | | |
| | GCCTAGAGCTGAAGGACGATCGCCCGG | | | |
| | CCAGAGATATGTGGGTAATGGAGACGG | | | |
| | GTCTGTTGTTGCCCCGGGCCACAGCTC | | | |
| | AAGACGCTGGAAAGTATTATTGTCACCG | | | |
| | TGGCAACCTGACCATGTCATTCCACCTG | | | |
| | GAGATCACTGCTCGGCCAGTACTATGG | | | |
| | CACTGGCTGCTGAGGACTGGTGGCTGG | | | |
| | AAGGTCTCAGCTGTGACTTTGGCTTATC | | | |
| | TGATCTTCTGCCTGTGTTCCCTTGTGGG | | | |
| | CATTCTTCATCTTCAAAGAGCCCTGGTC | | | |
| | CTGAGGAGGAAAAGAAAGCGAATGACT | | | |
| | GACCCCACCAGGAGATTC | | | |
| gsg | GGGAGTGGG | 611 | GSG | 612 |
| P2A | GCTACGAATTTTAGCTTGCTGAAGCAGG | 613 | ATNFSLLKQAGDVEENPGP | 614 |
| | CCGGTGATGTGGAAGAGAACCCCGGGC | | | |
| | CT | | | |
| FRBI | TGGCACGAAGGTTTGGAAGAGGCCTCC | 615 | WHEGLEEASRLYFGERNVKGMFEVLEPLHA | 616 |
| | CGCCTGTATTTCGGTGAGAGAAATGTCA | | MMERGPQTLKETSFNQAYGRDLMEAQEWC | |
| | AAGGTATGTTTGAAGTGCTTGAGCCCCT | | RKYMKSGNVKDLLQAWDLYYHVFRRISK* | |
| | GCACGCCATGATGGAACGGGGGCCGCA | | | |
| | GACTCTGAAAGAAACCTCATTCAACCAG | | | |
| | GCATACGGGCGAGACCTGATGGAAGCG | | | |
| | CAGGAATGGTGTAGGAAGTACATGAAGT | | | |
| | CCGGAAATGTGAAGGACTTGCTCCAGG | | | |
| | CTTGGGACCTGTACTATCACGTATTTCG | | | |
| | GAGAATAAGCAAG-TAA | | | |

pBP0755--pSFG-iC9.T2A-dCD19.P2A-FRB_{I}2

| | | | | |
|---|---|---|---|---|
| FKBP12v36 | ATGCTCGAGGGAGTGCAGGTGGAGACT | 617 | MLEGVQVETISPGDGRTFPKRGQTCVVHYT | 618 |
| | ATCTCCCCAGGAGACGGGCGCACCTTC | | GMLEDGKKVDSSRDRNKPFKFMLGKQEVIR | |
| | CCCAAGCGCGGCCAGACCTGCGTGGTG | | GWEEGVAQMSVGQRAKLTISPDYAYGATGH | |
| | CACTACACCGGGATGCTTGAAGATGGA | | PGIIPPHATLVFDVELLKLE | |
| | AAGAAAGTTGATTCCTCCCGGGACAGAA | | | |
| | ACAAGCCCTTTAAGTTTATGCTAGGCAA | | | |
| | GCAGGAGGTGATCCGAGGCTGGGAAGA | | | |
| | AGGGGTTGCCCAGATGAGTGTGGGTCA | | | |
| | GAGAGCCAAACTGACTATATCTCCAGAT | | | |
| | TATGCCTATGGTGCCACTGGGCACCCA | | | |
| | GGCATCATCCCACCACATGCCACTCTCG | | | |
| | TCTTCGATGTGGAGCTTCTAAAACTGGA | | | |
| | A | | | |
| Linker | TCTGGCGGTGGATCCGGA | 619 | SGGGSG | 620 |
| ΔCaspase9 | GTCGACGGATTTGGTGATGTCGGTGCT | 621 | VDGFGDVGALESLRGNADLAYILSMEPCGH | 622 |
| | CTTGAGAGTTTGAGGGGAAATGCAGATT | | CLIINNVNFCRESGLRTRTGSNIDCEKLRRRF | |
| | TGGCTTACATCCTGAGCATGGAGCCCT | | SSLHFMVEVKGDLTAKKMVLALLELARQDHG | |
| | GTGGCCACTGCCTCATTATCAACAATGT | | ALDCCVVVILSHGCQASHLQFPGAVYGTDG | |
| | GAACTTCTGCCGTGAGTCCGGGCTCCG | | CPVSVEKIVNIFNGTSCPSLGGKPKLFFIQAC | |
| | CACCCGCACTGGCTCCAACATCGACTG | | GGEQKDHGFEVASTSPEDESPGSNPEPDAT | |
| | TGAGAAGTTGCGGCGTCGCTTCTCCTC | | PFQEGLRTFDQLDAISSLPTPSDIFVSYSTFP | |
| | GCTGCATTTCATGGTGGAGGTGAAGGG | | GFVSWRDPKSGSWYVETLDDIFEQWAHSED | |
| | CGACCTGACTGCCAAGAAAATGGTGCT | | LQSLLLRVANAVSVKGIYKQMPGCFNFLRKK | |
| | GGCTTTGCTGGAGCTGGCGCGGCAGGA | | LFFKTSASRA | |
| | CCACGGTGCTCTGGACTGCTGCGTGGT | | | |
| | GGTCATTCTCTCTCACGGCTGTCAGGCC | | | |
| | AGCCACCTGCAGTTCCCAGGGGCTGTC | | | |
| | TACGGCACAGATGGATGCCCTGTGTCG | | | |
| | GTCGAGAAGATTGTGAACATCTTCAATG | | | |
| | GGACCAGCTGCCCCAGCCTGGGAGGG | | | |
| | AAGCCCAAGCTCTTTTTCATCCAGGCCT | | | |
| | GTGGTGGGGAGCAGAAAGACCATGGGT | | | |
| | TTGAGGTGGCCTCCACTTCCCCTGAAGA | | | |
| | CGAGTCCCCTGGCAGTAACCCCGAGCC | | | |
| | AGATGCCACCCCGTTCCAGGAAGGTTT | | | |
| | GAGGACCTTCGACCAGCTGGACGCCAT | | | |
| | ATCTAGTTTGCCCACACCCAGTGACATC | | | |
| | TTTGTGTCCTACTCTACTTTCCCAGGTTT | | | |
| | TGTTTCCTGGAGGGACCCCAAGAGTGG | | | |
| | CTCCTGGTACGTTGAGACCCTGGACGA | | | |
| | CATCTTTGAGCAGTGGGCTCACTCTGAA | | | |
| | GACCTGCAGTCCCTCCTGCTTAGGGTC | | | |
| | GCTAATGCTGTTTCGGTGAAAGGGATTT | | | |
| | ATAAACAGATGCCTGGTTGCTTTAATTTC | | | |
| | CTCCGGAAAAAACTTTTCTTTAAAACATC | | | |
| | AGCTAGCAGAGCC | | | |
| T2A | GAGGGCAGGGGAAGTCTTCTAACATGC | 623 | EGRGSLLTCGDVEENPGP | 624 |
| | GGGGACGTGGAGGAAAATCCCGGGCC | | | |
| | C | | | |
| ΔCD19 | ATGCCACCTCCTCGCCTCCTCTTCTTCC | 625 | MPPPRLLFFLLFLTPMEVRPEEPLVVKVEEG | 626 |
| | TCCTCTTCCTCACCCCCATGGAAGTCAG | | DNAVLQCLKGTSDGPTQQLTWSRESPLKPF | |
| | GCCCGAGGAACCTCTAGTGGTGAAGGT | | LKLSLGLPGLGIHMRPLAIWLFIFNVSQQMGG | |
| | GGAAGAGGGAGATAACGCTGTGCTGCA | | FYLCQPGPPSEKAWQPGWTVNVEGSGELF | |
| | GTGCCTCAAGGGGACCTCAGATGGCCC | | RWNVSDLGGLGCGLKNRSSEGPSSPSGKL | |
| | CACTCAGCAGCTGACCTGGTCTCGGGA | | MSPKLYVWAKDRPEIWEGEPPCLPPRDSLN | |
| | GTCCCCGCTTAAACCCTTCTTAAAACTC | | QSLSQDLTMAPGSTLWLSCGVPPDSVSRGP | |
| | AGCCTGGGGCTGCCAGGCCTGGGAATC | | LSWTHVHPKGPKSLLSLELKDDRPARDMWV | |
| | CACATGAGGCCCCTGGCCATCTGGCTT | | METGLLLPRATAQDAGKYYCHRGNLTMSFH | |
| | TTCATCTTCAACGTCTCTCAACAGATGG | | LEITARPVLWHWLLRTGGWKVSAVTLAYLIF | |
| | GGGGCTTCTACCTGTGCCAGCCGGGGC | | CLCSLVGILHLQRALVLRRKRKRMTDPTRRF | |
| | CCCCCTCTGAGAAGGCCTGGCAGCCTG | | | |
| | GCTGGACAGTCAATGTGGAGGGCAGCG | | | |
| | GGGAGCTGTTCCGGTGGAATGTTTCGG | | | |
| | ACCTAGGTGGCCTGGGCTGTGGCCTGA | | | |
| | AGAACAGGTCCTCAGAGGGCCCCAGCT | | | |
| | CCCCTTCCGGGAAGCTCATGAGCCCCA | | | |
| | AGCTGTATGTGTGGGCCAAAGACCGCC | | | |
| | CTGAGATCTGGGAGGGAGAGCCTCCGT | | | |
| | GTCTCCCACCGAGGGACAGCCTGAACC | | | |
| | AGAGCCTCAGCCAGGACCTCACCATGG | | | |
| | CCCCTGGCTCCACACTCTGGCTGTCCT | | | |
| | GTGGGGTACCCCCTGACTCTGTGTCCA | | | |
| | GGGGCCCCCTCTCCTGGACCCATGTGC | | | |
| | ACCCCAAGGGGCCTAAGTCATTGCTGA | | | |
| | GCCTAGAGCTGAAGGACGATCGCCCGG | | | |
| | CCAGAGATATGTGGGTAATGGAGACGG | | | |
| | GTCTGTTGTTGCCCCGGGCCACAGCTC | | | |
| | AAGACGCTGGAAAGTATTATTGTCACCG | | | |
| | TGGCAACCTGACCATGTCATTCCACCTG | | | |
| | GAGATCACTGCTCGGCCAGTACTATGG | | | |
| | CACTGGCTGCTGAGGACTGGTGGCTGG | | | |
| | AAGGTCTCAGCTGTGACTTTGGCTTATC | | | |
| | TGATCTTCTGCCTGTGTTCCCTTGTGGG | | | |
| | CATTCTTCATCTTCAAAGAGCCCTGGTC | | | |
| | CTGAGGAGGAAAAGAAAGCGAATGACT | | | |
| | GACCCCACCAGGAGATTC | | | |
| GSG-linker | GGGAGTGGG | 627 | GSG | 628 |
| P2A | GCTACGAATTTTAGCTTGCTGAAGCAGG | 629 | ATNFSLLKQAGDVEENPGP | 630 |
| | CCGGTGATGTGGAAGAGAACCCCGGGC | | | |
| | CT | | | |
| FRBI | TGGCATGAAGGTCTGGAAGAAGCTTCTC | 631 | WHEGLEEASRLYFGERNVKGMFEVLEPLHA | 632 |
| | GCCTTTATTTTGGCGAACGGAACGTAAA | | MMERGPQTLKETSFNQAYGRDLMEAQEWC | |
| | AGGTATGTTTGAAGTCCTGGAGCCATTG | | RKYMKSGNVKDLLQAWDLYYHVFRRISK | |
| | CACGCCATGATGGAGCGCGGGCCTCAG | | | |
| | ACCCTCAAGGAAACCAGTTTTAATCAGG | | | |
| | CCTATGGGCGAGACCTCATGGAGGCAC | | | |
| | AGGAATGGTGTCGGAAGTATATGAAGTC | | | |
| | CGGCAACGTTAAGGATCTCTTGCAGGC | | | |
| | CTGGGACTTGTATTATCACGTGTTCCGG | | | |
| | CGAATCAGCAAG | | | |
| Linker | Cgtacg | 633 | RT | 634 |
| FRBI′′ | TGGCACGAAGGTTTGGAAGAGGCCTCC | 635 | WHEGLEEASRLYFGERNVKGMFEVLEPLHA | 636 |
| | CGCCTGTATTTCGGTGAGAGAAATGTCA | | MMERGPQTLKETSFNQAYGRDLMEAQEWC | |
| | AAGGTATGTTTGAAGTGCTTGAGCCCCT | | RKYMKSGNVKDLLQAWDLYYHVFRRISK* | |
| | GCACGCCATGATGGAACGGGGGCCGCA | | | |
| | GACTCTGAAAGAAACCTCATTCAACCAG | | | |
| | GCATACGGGCGAGACCTGATGGAAGCG | | | |
| | CAGGAATGGTGTAGGAAGTACATGAAGT | | | |
| | CCGGAAATGTGAAGGACTTGCTCCAGG | | | |
| | CTTGGGACCTGTACTATCACGTATTTCG | | | |
| | GAGAATAAGCAAG-TAA | | | |

pBP0757--pSFG-iC9.T2A-dCD19.P2A-FRB_{I}3

| | | | | |
|---|---|---|---|---|
| FKBP12v36 | ATGCTCGAGGGAGTGCAGGTGGAGACT | 637 | MLEGVQVETISPGDGRTFPKRGQTCVVHYT | 638 |
| | ATCTCCCCAGGAGACGGGCGCACCTTC | | GMLEDGKKVDSSRDRNKPFKFMLGKQEVIR | |
| | CCCAAGCGCGGCCAGACCTGCGTGGTG | | GWEEGVAQMSVGQRAKLTISPDYAYGATGH | |
| | CACTACACCGGGATGCTTGAAGATGGA | | PGIIPPHATLVFDVELLKLE | |
| | AAGAAAGTTGATTCCTCCCGGGACAGAA | | | |
| | ACAAGCCCTTTAAGTTTATGCTAGGCAA | | | |
| | GCAGGAGGTGATCCGAGGCTGGGAAGA | | | |
| | AGGGGTTGCCCAGATGAGTGTGGGTCA | | | |
| | GAGAGCCAAACTGACTATATCTCCAGAT | | | |
| | TATGCCTATGGTGCCACTGGGCACCCA | | | |
| | GGCATCATCCCACCACATGCCACTCTCG | | | |
| | TCTTCGATGTGGAGCTTCTAAAACTGGA | | | |
| | A | | | |
| Linker | TCTGGCGGTGGATCCGGA | 639 | SGGGSG | 640 |
| ΔCaspase9 | GTCGACGGATTTGGTGATGTCGGTGCT | 641 | VDGFGDVGALESLRGNADLAYILSMEPCGH | 642 |
| | CTTGAGAGTTTGAGGGGAAATGCAGATT | | CLIINNVNFCRESGLRTRTGSNIDCEKLRRRF | |
| | TGGCTTACATCCTGAGCATGGAGCCCT | | SSLHFMVEVKGDLTAKKMVLALLELARQDHG | |
| | GTGGCCACTGCCTCATTATCAACAATGT | | ALDCCVVVILSHGCQASHLQFPGAVYGTDG | |
| | GAACTTCTGCCGTGAGTCCGGGCTCCG | | CPVSVEKIVNIFNGTSCPSLGGKPKLFFIQAC | |
| | CACCCGCACTGGCTCCAACATCGACTG | | GGEQKDHGFEVASTSPEDESPGSNPEPDAT | |
| | TGAGAAGTTGCGGCGTCGCTTCTCCTC | | PFQEGLRTFDQLDAISSLPTPSDIFVSYSTFP | |
| | GCTGCATTTCATGGTGGAGGTGAAGGG | | GFVSWRDPKSGSWYVETLDDIFEQWAHSED | |
| | CGACCTGACTGCCAAGAAAATGGTGCT | | LQSLLLRVANAVSVKGIYKQMPGCFNFLRKK | |
| | GGCTTTGCTGGAGCTGGCGCGGCAGGA | | LFFKTSASRA | |
| | CCACGGTGCTCTGGACTGCTGCGTGGT | | | |
| | GGTCATTCTCTCTCACGGCTGTCAGGCC | | | |
| | AGCCACCTGCAGTTCCCAGGGGCTGTC | | | |
| | TACGGCACAGATGGATGCCCTGTGTCG | | | |
| | GTCGAGAAGATTGTGAACATCTTCAATG | | | |
| | GGACCAGCTGCCCCAGCCTGGGAGGG | | | |
| | AAGCCCAAGCTCTTTTTCATCCAGGCCT | | | |
| | GTGGTGGGGAGCAGAAAGACCATGGGT | | | |
| | TTGAGGTGGCCTCCACTTCCCCTGAAGA | | | |
| | CGAGTCCCCTGGCAGTAACCCCGAGCC | | | |
| | AGATGCCACCCCGTTCCAGGAAGGTTT | | | |
| | GAGGACCTTCGACCAGCTGGACGCCAT | | | |
| | ATCTAGTTTGCCCACACCCAGTGACATC | | | |
| | TTTGTGTCCTACTCTACTTTCCCAGGTTT | | | |
| | TGTTTCCTGGAGGGACCCCAAGAGTGG | | | |
| | CTCCTGGTACGTTGAGACCCTGGACGA | | | |
| | CATCTTTGAGCAGTGGGCTCACTCTGAA | | | |
| | GACCTGCAGTCCCTCCTGCTTAGGGTC | | | |
| | GCTAATGCTGTTTCGGTGAAAGGGATTT | | | |
| | ATAAACAGATGCCTGGTTGCTTTAATTTC | | | |
| | CTCCGGAAAAAACTTTTCTTTAAAACATC | | | |
| | AGCTAGCAGAGCC | | | |
| T2A | GAGGGCAGGGGAAGTCTTCTAACATGC | 643 | EGRGSLLTCGDVEENPGP | 644 |
| | GGGGACGTGGAGGAAAATCCCGGGCC | | | |
| | C | | | |
| ΔCD19 | ATGCCACCTCCTCGCCTCCTCTTCTTCC | 645 | MPPPRLLFFLLFLTPMEVRPEEPLVVKVEEG | 646 |
| | TCCTCTTCCTCACCCCCATGGAAGTCAG | | DNAVLQCLKGTSDGPTQQLTWSRESPLKPF | |
| | GCCCGAGGAACCTCTAGTGGTGAAGGT | | LKLSLGLPGLGIHMRPLAIWLFIFNVSQQMGG | |
| | GGAAGAGGGAGATAACGCTGTGCTGCA | | FYLCQPGPPSEKAWQPGWTVNVEGSGELF | |
| | GTGCCTCAAGGGGACCTCAGATGGCCC | | RWNVSDLGGLGCGLKNRSSEGPSSPSGKL | |
| | CACTCAGCAGCTGACCTGGTCTCGGGA | | MSPKLYVWAKDRPEIWEGEPPCLPPRDSLN | |
| | GTCCCCGCTTAAACCCTTCTTAAAACTC | | QSLSQDLTMAPGSTLWLSCGVPPDSVSRGP | |
| | AGCCTGGGGCTGCCAGGCCTGGGAATC | | LSWTHVHPKGPKSLLSLELKDDRPARDMWV | |
| | CACATGAGGCCCCTGGCCATCTGGCTT | | METGLLLPRATAQDAGKYYCHRGNLTMSFH | |
| | TTCATCTTCAACGTCTCTCAACAGATGG | | LEITARPVLWHWLLRTGGWKVSAVTLAYLIF | |
| | GGGGCTTCTACCTGTGCCAGCCGGGGC | | CLCSLVGILHLQRALVLRRKRKRMTDPTRRF | |
| | CCCCCTCTGAGAAGGCCTGGCAGCCTG | | | |
| | GCTGGACAGTCAATGTGGAGGGCAGCG | | | |
| | GGGAGCTGTTCCGGTGGAATGTTTCGG | | | |
| | ACCTAGGTGGCCTGGGCTGTGGCCTGA | | | |
| | AGAACAGGTCCTCAGAGGGCCCCAGCT | | | |
| | CCCCTTCCGGGAAGCTCATGAGCCCCA | | | |
| | AGCTGTATGTGTGGGCCAAAGACCGCC | | | |
| | CTGAGATCTGGGAGGGAGAGCCTCCGT | | | |
| | GTCTCCCACCGAGGGACAGCCTGAACC | | | |
| | AGAGCCTCAGCCAGGACCTCACCATGG | | | |
| | CCCCTGGCTCCACACTCTGGCTGTCCT | | | |
| | GTGGGGTACCCCCTGACTCTGTGTCCA | | | |
| | GGGGCCCCCTCTCCTGGACCCATGTGC | | | |
| | ACCCCAAGGGGCCTAAGTCATTGCTGA | | | |
| | GCCTAGAGCTGAAGGACGATCGCCCGG | | | |
| | CCAGAGATATGTGGGTAATGGAGACGG | | | |
| | GTCTGTTGTTGCCCCGGGCCACAGCTC | | | |
| | AAGACGCTGGAAAGTATTATTGTCACCG | | | |
| | TGGCAACCTGACCATGTCATTCCACCTG | | | |
| | GAGATCACTGCTCGGCCAGTACTATGG | | | |
| | CACTGGCTGCTGAGGACTGGTGGCTGG | | | |
| | AAGGTCTCAGCTGTGACTTTGGCTTATC | | | |
| | TGATCTTCTGCCTGTGTTCCCTTGTGGG | | | |
| | CATTCTTCATCTTCAAAGAGCCCTGGTC | | | |
| | CTGAGGAGGAAAAGAAAGCGAATGACT | | | |
| | GACCCCACCAGGAGATTC | | | |
| GSG (linker) | GGGAGTGGG | 647 | GSG | 648 |
| P2A | GCTACGAATTTTAGCTTGCTGAAGCAGG | 649 | ATNFSLLKQAGDVEENPGP | 650 |
| | CCGGTGATGTGGAAGAGAACCCCGGGC | | | |
| | CT | | | |
| FRBI | TGGCATGAAGGTCTGGAAGAAGCTTCTC | 651 | WHEGLEEASRLYFGERNVKGMFEVLEPLHA | 652 |
| | GCCTTTATTTTGGCGAACGGAACGTAAA | | MMERGPQTLKETSFNQAYGRDLMEAQEWC | |
| | AGGTATGTTTGAAGTCCTGGAGCCATTG | | RKYMKSGNVKDLLQAWDLYYHVFRRISK | |
| | CACGCCATGATGGAGCGCGGGCCTCAG | | | |
| | ACCCTCAAGGAAACCAGTTTTAATCAGG | | | |
| | CCTATGGGCGAGACCTCATGGAGGCAC | | | |
| | AGGAATGGTGTCGGAAGTATATGAAGTC | | | |
| | CGGCAACGTTAAGGATCTCTTGCAGGC | | | |
| | CTGGGACTTGTATTATCACGTGTTCCGG | | | |
| | CGAATCAGCAAG | | | |
| Linker | Cgtacg | 653 | RT | 654 |
| FRBI′ | TGGCACGAAGGTCTgGAcGAGGCTAGTA | 655 | WHEGLDEASRLYFGERNVKGMFEVLEPLHA | 656 |
| | GACTGTATTTCGGCGAGAGAAATGTAAA | | MMERGPQTLKETSFNQAYGRDLMEAQEWC | |
| | GGGAATGTTCGAGGTACTGGAGCCTCT | | RKYMKSGNVKDLLQAWDLYYHVFRRISK | |
| | GCACGCCATGATGGAACGCGGCCCTCA | | | |
| | GACACTCAAGGAGACTAGTTTTAACCAG | | | |
| | GCCTATGGCAGGGATCTGATGGAGGCT | | | |
| | CAGGAATGGTGCCGGAAGTAtATGAAAA | | | |
| | GCGGTAACGTGAAGGACCTGCTGCAGG | | | |
| | CCTGGGATCTGTATTATCACGTGTTTAG | | | |
| | AAGAATCTCTAAA | | | |
| Linker | Cgtacg | 657 | RT | 658 |
| FRBI′′ | TGGCACGAAGGTTTGGAAGAGGCCTCC | 659 | WHEGLEEASRLYFGERNVKGMFEVLEPLHA | 660 |
| | CGCCTGTATTTCGGTGAGAGAAATGTCA | | MMERGPQTLKETSFNQAYGRDLMEAQEWC | |
| | AAGGTATGTTTGAAGTGCTTGAGCCCCT | | RKYMKSGNVKDLLQAWDLYYHVFRRISK* | |
| | GCACGCCATGATGGAACGGGGGCCGCA | | | |
| | GACTCTGAAAGAAACCTCATTCAACCAG | | | |
| | GCATACGGGCGAGACCTGATGGAAGCG | | | |
| | CAGGAATGGTGTAGGAAGTACATGAAGT | | | |
| | CCGGAAATGTGAAGGACTTGCTCCAGG | | | |
| | CTTGGGACCTGTACTATCACGTATTTCG | | | |
| | GAGAATAAGCAAG-TAA | | | |

pBP0655--pSFG-ΔMyr.FRB_{I}.MC.2A-ΔCD19

| | | | | |
|---|---|---|---|---|
| FRB_{I}′ | TGGCACGAGGGGCTGGAGGAGGCAAG | 661 | WHEGLEEASRLYFGERNVKGMFEVLEPLHA | 662 |
| | TCGACTGTATTTTGGAGAACGCAACGTA | | MMERGPQTLKETSFNQAYGRDLMEAQEWC | |
| | AAGGGAATGTTTGAGGTGCTCGAACCA | | RKYMKSGNVKDLLQAWDLYYHVFRRISK | |
| | CTCCATGCTATGATGGAAAGGGGGCCT | | | |
| | CAGACTCTTAAGGAAACAAGTTTTAATC | | | |
| | AAGCCTACGGACGAGACCTCATGGAGG | | | |
| | CGCAGGAGTGGTGCAGAAAATACATGA | | | |
| | AATCAGGTAATGTTAAGGACCTGCTGCA | | | |
| | GGCATGGGACCTGTACTACCATGTCTTC | | | |
| | AGGCGCATCTCAAAG | | | |
| Linker | ATGCATTCTGGTGGAGGATCAGGCGTT | 663 | MHSGGGSGVE | 664 |
| | GAA | | | |
| MyD88L | GCAGCTGGAGGCCCTGGCGCAGGCTCT | 665 | AAGGPGAGSAAPVSSTSSLPLAALNMRVRR | 666 |
| | GCAGCCCCTGTATCTAGCACCTCTTCTC | | RLSLFLNVRTQVAADWTALAEEMDFEYLEIR | |
| | TTCCTCTGGCTGCGCTGAACATGAGAGT | | QLETQADPTGRLLDAWQGRPGASVGRLLDL | |
| | GCGGAGACGGTTGTCTTTGTTCTTGAAT | | LTKLGRDDVLLELGPSIEEDCQKYILKQQQEE | |
| | GTCAGAACACAGGTTGCAGCGGACTGG | | AEKPLQVAAVDSSVPRTAELAGITTLDDPLG | |
| | ACCGCTCTGGCCGAGGAAATGGACTTC | | HMPERFDAFICYCPSDI | |
| | GAGTACCTGGAGATCAGGCAACTCGAA | | | |
| | ACGCAGGCAGATCCTACAGGCAGACTG | | | |
| | TTGGATGCGTGGCAGGGACGGCCCGGA | | | |
| | GCCAGCGTTGGACGGCTCCTTGATCTT | | | |
| | CTCACCAAGCTGGGCAGAGATGACGTG | | | |
| | CTGCTGGAATTGGGCCCCAGTATTGAG | | | |
| | GAGGACTGCCAAAAATACATCTTGAAGC | | | |
| | AGCAACAGGAGGAGGCGGAGAAGCCC | | | |
| | CTCCAGGTCGCAGCCGTCGATTCATCC | | | |
| | GTGCCTAGAACAGCCGAACTTGCAGGC | | | |
| | ATCACTACCCTGGATGATCCCCTGGGC | | | |
| | CATATGCCAGAGAGGTTTGATGCGTTTA | | | |
| | TCTGCTATTGCCCAAGCGATATC | | | |
| Linker | GTTGAG | 667 | VE | 668 |
| hCD40 | AAGAAGGTGGCCAAGAAGCCAACCAAT | 669 | KKVAKKPTNKAPHPKQEPQEINFPDDLPGSN | 670 |
| | AAAGCTCCACATCCTAAACAGGAGCCAC | | TAAPVQETLHGCQPVTQEDGKESRISVQER | |
| | AAGAAATCAACTTTCCAGATGATCTCCC | | Q | |
| | TGGCTCTAATACTGCAGCCCCCGTGCA | | | |
| | GGAAACCCTGCACGGCTGTCAACCTGT | | | |
| | GACACAGGAAGACGGGAAGGAAAGCAG | | | |
| | GATATCCGTGCAGGAACGGCAA | | | |
| Linker | GTCGAC | 671 | VD | 672 |
| HA epitope | TACCCATACGACGTGCCAGATTATGCT | 673 | YPYDVPDYA | 674 |
| Linker | CCGCGG | 675 | PR | 676 |
| T2A | GAAGGCCGAGGGAGCCTGCTGACATGT | 677 | EGRGSLLTCGDVEENPGP | 678 |
| | GGCGATGTGGAGGAAAACCCAGGACCA | | | |
| ΔCD19 | ATGCCACCACCTCGCCTGCTGTTCTTTC | 679 | MPPPRLLFFLLFLTPMEVRPEEPLVVKVEEG | 680 |
| | TGCTGTTCCTGACACCTATGGAGGTGC | | DNAVLQCLKGTSDGPTQQLTWSRESPLKPF | |
| | GACCTGAGGAACCACTGGTCGTGAAGG | | LKLSLGLPGLGIHMRPLAIWLFIFNVSQQMGG | |
| | TCGAGGAAGGCGACAATGCCGTGCTGC | | FYLCQPGPPSEKAWQPGWTVNVEGSGELF | |
| | AGTGCCTGAAAGGCACTTCTGATGGGC | | RWNVSDLGGLGCGLKNRSSEGPSSPSGKL | |
| | CAACTCAGCAGCTGACCTGGTCCAGGG | | MSPKLYVWAKDRPEIWEGEPPCLPPRDSLN | |
| | AGTCTCCCCTGAAGCCTTTTCTGAAACT | | QSLSQDLTMAPGSTLWLSCGVPPDSVSRGP | |
| | GAGCCTGGGACTGCCAGGACTGGGAAT | | LSWTHVHPKGPKSLLSLELKDDRPARDMWV | |
| | CCACATGCGCCCTCTGGCTATCTGGCT | | METGLLLPRATAQDAGKYYCHRGNLTMSFH | |
| | GTTCATCTTCAACGTGAGCCAGCAGATG | | LEITARPVLWHWLLRTGGWKVSAVTLAYLIF | |
| | GGAGGATTCTACCTGTGCCAGCCAGGA | | CLCSLVGILHLQRALVLRRKRKRMTDPTRRF* | |
| | CCACCATCCGAGAAGGCCTGGCAGCCT | | | |
| | GGATGGACCGTCAACGTGGAGGGGTCT | | | |
| | GGAGAACTGTTTAGGTGGAATGTGAGT | | | |
| | GACCTGGGAGGACTGGGATGTGGGCTG | | | |
| | AAGAACCGCTCCTCTGAAGGCCCAAGTT | | | |
| | CACCCTCAGGGAAGCTGATGAGCCCAA | | | |
| | AACTGTACGTGTGGGCCAAAGATCGGC | | | |
| | CCGAGATCTGGGAGGGAGAACCTCCAT | | | |
| | GCCTGCCACCTAGAGACAGCCTGAATC | | | |
| | AGAGTCTGTCACAGGATCTGACAATGGC | | | |
| | CCCCGGGTCCACTCTGTGGCTGTCTTG | | | |
| | TGGAGTCCCACCCGACAGCGTGTCCAG | | | |
| | AGGCCCTCTGTCCTGGACCCACGTGCA | | | |
| | TCCTAAGGGGCCAAAAAGTCTGCTGTCA | | | |
| | CTGGAACTGAAGGACGATCGGCCTGCC | | | |
| | AGAGACATGTGGGTCATGGAGACTGGA | | | |
| | CTGCTGCTGCCACGAGCAACCGCACAG | | | |
| | GATGCTGGAAAATACTATTGCCACCGGG | | | |
| | GCAATCTGACAATGTCCTTCCATCTGGA | | | |
| | GATCACTGCAAGGCCCGTGCTGTGGCA | | | |
| | CTGGCTGCTGCGAACCGGAGGATGGAA | | | |
| | GGTCAGTGCTGTGACACTGGCATATCTG | | | |
| | ATCTTTTGCCTGTGCTCCCTGGTGGGCA | | | |
| | TTCTGCATCTGCAGAGAGCCCTGGTGCT | | | |
| | GCGGAGAAAGAGAAAGAGAATGACTGA | | | |
| | CCCAACAAGAAGGTTTTGA | | | |

pBP0498--pSFG-ΔMyr.iMC.FRB_{I}2.P2A-ΔCD19

| | | | | |
|---|---|---|---|---|
| Start | ATGCTCGAG | 681 | MLE | 682 |
| FRB_{I}^{∧} | TGGCACGAGGGGCTGGAGGAGGCAAG | 683 | WHEGLEEASRLYFGERNVKGMFEVLEPLHA | 684 |
| | TCGACTGTATTTTGGAGAACGCAACGTA | | MMERGPQTLKETSFNQAYGRDLMEAQEWC | |
| | AAGGGAATGTTTGAGGTGCTCGAACCA | | RKYMKSGNVKDLLQAWDLYYHVFRRISK | |
| | CTCCATGCTATGATGGAAAGGGGGCCT | | | |
| | CAGACTCTTAAGGAAACAAGTTTTAATC | | | |
| | AAGCCTACGGACGAGACCTCATGGAGG | | | |
| | CGCAGGAGTGGTGCAGAAAATACATGA | | | |
| | AATCAGGTAATGTTAAGGACCTGCTGCA | | | |
| | GGCATGGGACCTGTACTACCATGTCTTC | | | |
| | AGGCGCATCTCAAAG | | | |
| Linker | ATGCAT | 685 | MH | 686 |
| FRB_{I}^{∧∧} | TGGCACGAAGGCCTGGAAGAGGCCTCA | 687 | WHEGLEEASRLYFGERNVKGMFEVLEPLHA | 688 |
| | AGACTTTACTTTGGTGAACGCAACGTTA | | MMERGPQTLKETSFNQAYGRDLMEAQEWC | |
| | AAGGCATGTTCGAGGTGCTGGAACCCT | | RKYMKSGNVKDLLQAWDLYYHVFRRISK | |
| | TGCATGCAATGATGGAGCGAGGTCCTC | | | |
| | AGACACTCAAAGAGACATCTTTTAACCA | | | |
| | GGCGTATGGACGGGACCTCATGGAGGC | | | |
| | TCAGGAATGGTGCCGCAAGTACATGAAA | | | |
| | AGTGGGAATGTGAAGGATCTGCTGCAA | | | |
| | GCATGGGATCTGTATTACCACGTGTTTA | | | |
| | GACGGATCAGCAAA | | | |
| Linker | ATGCATTCTGGTGGAGGATCAGGCGTT | 689 | MHSGGGSGVE | 690 |
| | GAA | | | |
| MyD88L | GCAGCTGGAGGCCCTGGCGCAGGCTCT | 691 | AAGGPGAGSAAPVSSTSSLPLAALNMRVRR | 692 |
| | GCAGCCCCTGTATCTAGCACCTCTTCTC | | RLSLFLNVRTQVAADWTALAEEMDFEYLEIR | |
| | TTCCTCTGGCTGCGCTGAACATGAGAGT | | QLETQADPTGRLLDAWQGRPGASVGRLLDL | |
| | GCGGAGACGGTTGTCTTTGTTCTTGAAT | | LTKLGRDDVLLELGPSIEEDCQKYILKQQQEE | |
| | GTCAGAACACAGGTTGCAGCGGACTGG | | AEKPLQVAAVDSSVPRTAELAGITTLDDPLG | |
| | ACCGCTCTGGCCGAGGAAATGGACTTC | | HMPERFDAFICYCPSDI | |
| | GAGTACCTGGAGATCAGGCAACTCGAA | | | |
| | ACGCAGGCAGATCCTACAGGCAGACTG | | | |
| | TTGGATGCGTGGCAGGGACGGCCCGGA | | | |
| | GCCAGCGTTGGACGGCTCCTTGATCTT | | | |
| | CTCACCAAGCTGGGCAGAGATGACGTG | | | |
| | CTGCTGGAATTGGGCCCCAGTATTGAG | | | |
| | GAGGACTGCCAAAAATACATCTTGAAGC | | | |
| | AGCAACAGGAGGAGGCGGAGAAGCCC | | | |
| | CTCCAGGTCGCAGCCGTCGATTCATCC | | | |
| | GTGCCTAGAACAGCCGAACTTGCAGGC | | | |
| | ATCACTACCCTGGATGATCCCCTGGGC | | | |
| | CATATGCCAGAGAGGTTTGATGCGTTTA | | | |
| | TCTGCTATTGCCCAAGCGATATC | | | |
| Linker | GTTGAG | 693 | VE | 694 |
| hCD40 | AAGAAGGTGGCCAAGAAGCCAACCAAT | 695 | KKVAKKPTNKAPHPKQEPQEINFPDDLPGSN | 696 |
| | AAAGCTCCACATCCTAAACAGGAGCCAC | | TAAPVQETLHGCQPVTQEDGKESRISVQER | |
| | AAGAAATCAACTTTCCAGATGATCTCCC | | Q | |
| | TGGCTCTAATACTGCAGCCCCCGTGCA | | | |
| | GGAAACCCTGCACGGCTGTCAACCTGT | | | |
| | GACACAGGAAGACGGGAAGGAAAGCAG | | | |
| | GATATCCGTGCAGGAACGGCAA | | | |
| Linker | GTCGAC | 697 | VD | 698 |
| HA | TACCCATACGACGTGCCAGATTATGCT | 699 | YPYDVPDYA | 700 |
| Linker | CCGCGG | 701 | PR | 702 |
| T2A | GAAGGCCGAGGGAGCCTGCTGACATGT | 703 | EGRGSLLTCGDVEENPGP | 704 |
| | GGCGATGTGGAGGAAAACCCAGGACCA | | | |
| ΔCD19 | ATGCCACCACCTCGCCTGCTGTTCTTTC | 705 | MPPPRLLFFLLFLTPMEVRPEEPLVVKVEEG | 706 |
| | TGCTGTTCCTGACACCTATGGAGGTGC | | DNAVLQCLKGTSDGPTQQLTWSRESPLKPF | |
| | GACCTGAGGAACCACTGGTCGTGAAGG | | LKLSLGLPGLGIHMRPLAIWLFIFNVSQQMGG | |
| | TCGAGGAAGGCGACAATGCCGTGCTGC | | FYLCQPGPPSEKAWQPGWTVNVEGSGELF | |
| | AGTGCCTGAAAGGCACTTCTGATGGGC | | RWNVSDLGGLGCGLKNRSSEGPSSPSGKL | |
| | CAACTCAGCAGCTGACCTGGTCCAGGG | | MSPKLYVWAKDRPEIWEGEPPCLPPRDSLN | |
| | AGTCTCCCCTGAAGCCTTTTCTGAAACT | | QSLSQDLTMAPGSTLWLSCGVPPDSVSRGP | |
| | GAGCCTGGGACTGCCAGGACTGGGAAT | | LSWTHVHPKGPKSLLSLELKDDRPARDMWV | |
| | CCACATGCGCCCTCTGGCTATCTGGCT | | METGLLLPRATAQDAGKYYCHRGNLTMSFH | |
| | GTTCATCTTCAACGTGAGCCAGCAGATG | | LEITARPVLWHWLLRTGGWKVSAVTLAYLIF | |
| | GGAGGATTCTACCTGTGCCAGCCAGGA | | CLCSLVGILHLQRALVLRRKRKRMTDPTRRF* | |
| | CCACCATCCGAGAAGGCCTGGCAGCCT | | | |
| | GGATGGACCGTCAACGTGGAGGGGTCT | | | |
| | GGAGAACTGTTTAGGTGGAATGTGAGT | | | |
| | GACCTGGGAGGACTGGGATGTGGGCTG | | | |
| | AAGAACCGCTCCTCTGAAGGCCCAAGTT | | | |
| | CACCCTCAGGGAAGCTGATGAGCCCAA | | | |
| | AACTGTACGTGTGGGCCAAAGATCGGC | | | |
| | CCGAGATCTGGGAGGGAGAACCTCCAT | | | |
| | GCCTGCCACCTAGAGACAGCCTGAATC | | | |
| | AGAGTCTGTCACAGGATCTGACAATGGC | | | |
| | CCCCGGGTCCACTCTGTGGCTGTCTTG | | | |
| | TGGAGTCCCACCCGACAGCGTGTCCAG | | | |
| | AGGCCCTCTGTCCTGGACCCACGTGCA | | | |
| | TCCTAAGGGGCCAAAAAGTCTGCTGTCA | | | |
| | CTGGAACTGAAGGACGATCGGCCTGCC | | | |
| | AGAGACATGTGGGTCATGGAGACTGGA | | | |
| | CTGCTGCTGCCACGAGCAACCGCACAG | | | |
| | GATGCTGGAAAATACTATTGCCACCGGG | | | |
| | GCAATCTGACAATGTCCTTCCATCTGGA | | | |
| | GATCACTGCAAGGCCCGTGCTGTGGCA | | | |
| | CTGGCTGCTGCGAACCGGAGGATGGAA | | | |
| | GGTCAGTGCTGTGACACTGGCATATCTG | | | |
| | ATCTTTTGCCTGTGCTCCCTGGTGGGCA | | | |
| | TTCTGCATCTGCAGAGAGCCCTGGTGCT | | | |
| | GCGGAGAAAGAGAAAGAGAATGACTGA | | | |
| | CCCAACAAGAAGGTTTTGA | | | |

pBP0488--pSFG-aHER2.Q.8stm.CD3zeta.Fpk2

| | | | | |
|---|---|---|---|---|
| Signal Peptide | ATGGAGTTTGGACTTTCTTGGTTGTTTTT | 707 | MEFGLSWLFLVAILKGVQCSR | 708 |
| | GGTGGCAATTCTGAAGGGTGTCCAGTG | | | |
| | TAGCAGG | | | |
| FRP5-VL | GACATCCAATTGACACAATCACACAAAT | 709 | DIQLTQSHKFLSTSVGDRVSITCKASQDVYN | 710 |
| | TTCTCTCAACTTCTGTAGGAGACAGAGT | | AVAWYQQKPGQSPKLLIYSASSRYTGVPSR | |
| | GAGCATAACCTGCAAAGCATCCCAGGA | | FTGSGSGPDFTFTISSVQAEDLAVYFCQQHF | |
| | CGTGTACAATGCTGTGGCTTGGTACCAA | | RTPFTFGSGTKLEIKAL | |
| | CAGAAGCCTGGACAATCCCCAAAATTGC | | | |
| | TGATTTATTCTGCCTCTAGTAGGTACACT | | | |
| | GGGGTACCTTCTCGGTTTACGGGCTCT | | | |
| | GGGTCCGGACCAGATTTCACGTTCACAA | | | |
| | TCAGTTCCGTTCAAGCTGAAGACCTCGC | | | |
| | TGTTTATTTTTGCCAGCAGCACTTCCGA | | | |
| | ACCCCTTTTACTTTTGGCTCAGGCACTA | | | |
| | AGTTGGAAATCAAGGCTTTG | | | |
| Linker | GGCGGAGGAAGCGGAGGTGGGGGC | 711 | GGGSGGGG | 712 |
| FRP5-VH | GAAGTCCAATTGCAACAGTCAGGCCCC | 713 | EVQLQQSGPELKKPGETVKISCKASGYPFTN | 714 |
| | GAATTGAAAAAGCCCGGCGAAACAGTG | | YGMNWVKQAPGQGLKWMGWINTSTGESTF | |
| | AAGATATCTTGTAAAGCCTCCGGTTACC | | ADDFKGRFDFSLETSANTAYLQINNLKSEDM | |
| | CTTTTACGAACTATGGAATGAACTGGGT | | ATYFCARWEVYHGYVPYWGQGTTVTVSS | |
| | CAAACAAGCCCCTGGACAGGGATTGAA | | | |
| | GTGGATGGGATGGATCAATACATCAACA | | | |
| | GGCGAGTCTACCTTCGCAGATGATTTCA | | | |
| | AAGGTCGCTTTGACTTCTCACTGGAGAC | | | |
| | CAGTGCAAATACCGCCTACCTTCAGATT | | | |
| | AACAATCTTAAAAGCGAGGATATGGCAA | | | |
| | CCTACTTTTGCGCAAGATGGGAAGTTTA | | | |
| | TCACGGGTACGTGCCATACTGGGGACA | | | |
| | AGGAACGACAGTGACAGTTAGTAGC | | | |
| Linker | GGATCC | 715 | GS | 716 |
| Q-Bend-10 | GAACTTCCTACTCAGGGGACTTTCTCAA | 717 | ELPTQGTFSNVSTNVS | 718 |
| (CD34 Epitope) | ACGTTAGCACAAACGTAAGT | | | |
| CD8 Stalk | CCCGCCCCAAGACCCCCCACACCTGCG | 719 | PAPRPPTPAPTIASQPLSLRPEACRPAAGGA | 720 |
| | CCGACCATTGCTTCTCAACCCCTGAGTT | | VHTRGLDFACD | |
| | TGAGACCCGAGGCCTGCCGGCCAGCTG | | | |
| | CCGGCGGGGCCGTGCATACAAGAGGAC | | | |
| | TCGATTTCGCTTGCGAC | | | |
| CD8a tm | ATCTATATCTGGGCACCTCTCGCTGGCA | 721 | IYIWAPLAGTCGVLLLSLVITLYCNHRNRRRV | 722 |
| | CCTGTGGAGTCCTTCTGCTCAGCCTGGT | | CKCPR | |
| | TATTACTCTGTACTGTAATCACCGGAAT | | | |
| | CGCCGCCGCGTTTGTAAGTGTCCCAGG | | | |
| Linker | CTCGAG | 723 | LE | 724 |
| CD3 zeta | AGAGTGAAGTTCAGCAGGAGCGCAGAC | 725 | RVKFSRSADAPAYQQGQNQLYNELNLGRRE | 726 |
| | GCCCCCGCGTACCAGCAGGGCCAGAAC | | EYDVLDKRRGRDPEMGGKPRRKNPQEGLY | |
| | CAGCTCTATAACGAGCTCAATCTAGGAC | | NELQKDKMAEAYSEIGMKGERRRGKGHDGL | |
| | GAAGAGAGGAGTACGATGTTTTGGACAA | | YQGLSTATKDTYDALHMQALPP | |
| | GAGACGTGGCCGGGACCCTGAGATGG | | | |
| | GGGGAAAGCCGAGAAGGAAGAACCCTC | | | |
| | AGGAAGGCCTGTACAATGAACTGCAGA | | | |
| | AAGATAAGATGGCGGAGGCCTACAGTG | | | |
| | AGATTGGGATGAAAGGCGAGCGCCGGA | | | |
| | GGGGCAAGGGGCACGATGGCCTTTACC | | | |
| | AGGGTCTCAGTACAGCCACCAAGGACA | | | |
| | CCTACGACGCCCTTCACATGCAAGCTCT | | | |
| | TCCACCTCG | | | |
| Linker | TCAGGCGGTGGCTCAGGTGTTAAC | 727 | SGGGSGVN | 728 |
| Fpk′ | GGCGTCCAAGTCGAAACCATTAGTCCC | 729 | GVQVETISPGDGRTFPKRGQTCVVHYTGML | 730 |
| | GGCGATGGCAGAACATTTCCTAAAAGG | | EDGKKFDSSRDRNKPFKFMLGKQEVIRGWE | |
| | GGACAAACATGTGTCGTCCATTATACAG | | EGVAQMSVGQRAKLTISPDYAYGATGHPPKI | |
| | GCATGTTGGAGGACGGCAAAAAGTTCG | | PPHATLVFDVELLKLE | |
| | ACAGTAGTAGAGATCGCAATAAACCTTT | | | |
| | CAAATTCATGTTGGGAAAACAAGAAGTC | | | |
| | ATTAGGGGATGGGAGGAGGGCGTGGCT | | | |
| | CAAATGTCCGTCGGCCAACGCGCTAAG | | | |
| | CTCACCATCAGCCCCGACTACGCATAC | | | |
| | GGCGCTACCGGACATCCCCCTAAGATT | | | |
| | CCCCCTCACGCTACCTTGGTGTTTGACG | | | |
| | TCGAACTGTTGAAGCTCGAA | | | |
| Linker | GTTAAC | 731 | VN | 732 |
| Fpk | GGAGTGCAGGTGGAGACTATCTCCCCA | 733 | GVQVETISPGDGRTFPKRGQTCVVHYTGML | 734 |
| | GGAGACGGGCGCACCTTCCCCAAGCGC | | EDGKKFDSSRDRNKPFKFMLGKQEVIRGWE | |
| | GGCCAGACCTGCGTGGTGCACTACACC | | EGVAQMSVGQRAKLTISPDYAYGATGHPPKI | |
| | GGGATGCTTGAAGATGGAAAGAAATTCG | | PPHATLVFDVELLKLE | |
| | ATTCCTCTCGGGACAGAAACAAGCCCTT | | | |
| | TAAGTTTATGCTAGGCAAGCAGGAGGTG | | | |
| | ATCCGAGGCTGGGAAGAAGGGGTTGCC | | | |
| | CAGATGAGTGTGGGTCAGAGAGCCAAA | | | |
| | CTGACTATATCTCCAGATTATGCCTATG | | | |
| | GTGCCACTGGGCACCCACCTAAGATCC | | | |
| | CACCACATGCCACTCTCGTCTTCGATGT | | | |
| | GGAGCTTCTAAAACTGGAA | | | |
| GSG Linker | GGATCGGGA | 735 | GSG | 736 |
| P2A | GCTACTAACTTCAGCCTGCTGAAGCAGG | 737 | ATNFSLLKQAGDVEENPGP | 738 |
| | CTGGAGACGTGGAGGAGAACCCCGGG | | | |
| | CCT | | | |

pBP0467--pSH1-FRBI′.FRBI.LS.ΔCaspase9

| | | | | |
|---|---|---|---|---|
| FRB_{I}′ | TGGCATGAAGGCCTGGAAGAGGCATCT | 739 | WHEGLEEASRLYFGERNVKGMFEVLEPLHA | 740 |
| | CGTTTGTACTTTGGGGAAAGGAACGTGA | | MMERGPQTLKETSFNQAYGRDLMEAQEWC | |
| | AAGGCATGTTTGAGGTGCTGGAGCCCT | | RKYMKSGNVKDLLQAWDLYYHVFRRISK | |
| | TGCACGCTATGATGGAACGGGGCCCCC | | | |
| | AGACTCTGAAGGAAACATCCTTTAATCA | | | |
| | GGCCTATGGTCGAGATTTAATGGAGGC | | | |
| | CCAAGAGTGGTGCAGGAAGTACATGAA | | | |
| | ATCAGGGAATGTCAAGGACCTCCTCCAA | | | |
| | GCCTGGGACCTCTATTATCATGTGTTCC | | | |
| | GACGAATCTCAAAG | | | |
| Linker | GTCGAG | 741 | VE | 742 |
| FRB_{I} | TGGCATGAAGGGTTGGAAGAAGCTTCA | 743 | WHEGLEEASRLYFGERNVKGMFEVLEPLHA | 744 |
| | AGGCTGTACTTCGGAGAGAGGAACGTG | | MMERGPQTLKETSFNQAYGRDLMEAQEWC | |
| | AAGGGCATGTTTGAGGTTCTTGAACCTC | | RKYMKSGNVKDLLQAWDLYYHVFRRISK | |
| | TGCACGCCATGATGGAACGGGGACCGC | | | |
| | AGACACTGAAAGAAACCTCTTTTAATCA | | | |
| | GGCCTACGGCAGAGACCTGATGGAGGC | | | |
| | CCAAGAATGGTGTAGAAAGTATATGAAA | | | |
| | TCCGGTAACGTGAAAGACCTGCTCCAG | | | |
| | GCCTGGGACCTTTATTACCATGTGTTCA | | | |
| | GGCGGATCAGTAAG | | | |
| Linker | TCAGGCGGTGGCTCAGGT | 745 | SGGGSG | 746 |
| ΔCaspase9 | GTCGACGGATTTGGTGATGTCGGTGCT | 747 | VDGFGDVGALESLRGNADLAYILSMEPCGH | 748 |
| | CTTGAGAGTTTGAGGGGAAATGCAGATT | | CLIINNVNFCRESGLRTRTGSNIDCEKLRRRF | |
| | TGGCTTACATCCTGAGCATGGAGCCCT | | SSLHFMVEVKGDLTAKKMVLALLELARQDHG | |
| | GTGGCCACTGCCTCATTATCAACAATGT | | ALDCCVVVILSHGCQASHLQFPGAVYGTDG | |
| | GAACTTCTGCCGTGAGTCCGGGCTCCG | | CPVSVEKIVNIFNGTSCPSLGGKPKLFFIQAC | |
| | CACCCGCACTGGCTCCAACATCGACTG | | GGEQKDHGFEVASTSPEDESPGSNPEPDAT | |
| | TGAGAAGTTGCGGCGTCGCTTCTCCTC | | PFQEGLRTFDQLDAISSLPTPSDIFVSYSTFP | |
| | GCTGCATTTCATGGTGGAGGTGAAGGG | | GFVSWRDPKSGSWYVETLDDIFEQWAHSED | |
| | CGACCTGACTGCCAAGAAAATGGTGCT | | LQSLLLRVANAVSVKGIYKQMPGCFNFLRKK | |
| | GGCTTTGCTGGAGCTGGCGCgGCAGGA | | LFFKTSASRAEGRGSLLTCGDVEENPGP* | |
| | CCACGGTGCTCTGGACTGCTGCGTGGT | | | |
| | GGTCATTCTCTCTCACGGCTGTCAGGCC | | | |
| | AGCCACCTGCAGTTCCCAGGGGCTGTC | | | |
| | TACGGCACAGATGGATGCCCTGTGTCG | | | |
| | GTCGAGAAGATTGTGAACATCTTCAATG | | | |
| | GGACCAGCTGCCCCAGCCTGGGAGGG | | | |
| | AAGCCCAAGCTCTTTTTCATCCAGGCCT | | | |
| | GTGGTGGGGAGCAGAAAGACCATGGGT | | | |
| | TTGAGGTGGCCTCCACTTCCCCTGAAGA | | | |
| | CGAGTCCCCTGGCAGTAACCCCGAGCC | | | |
| | AGATGCCACCCCGTTCCAGGAAGGTTT | | | |
| | GAGGACCTTCGACCAGCTGGACGCCAT | | | |
| | ATCTAGTTTGCCCACACCCAGTGACATC | | | |
| | TTTGTGTCCTACTCTACTTTCCCAGGTTT | | | |
| | TGTTTCCTGGAGGGACCCCAAGAGTGG | | | |
| | CTCCTGGTACGTTGAGACCCTGGACGA | | | |
| | CATCTTTGAGCAGTGGGCTCACTCTGAA | | | |
| | GACCTGCAGTCCCTCCTGCTTAGGGTC | | | |
| | GCTAATGCTGTTTCGGTGAAAGGGATTT | | | |
| | ATAAACAGATGCCTGGTTGCTTTAATTTC | | | |
| | CTCCGGAAAAAACTTTTCTTTAAAACATC | | | |
| | AGCTAGCAGAGCCGAGGGCAGGGGAA | | | |
| | GTCTTCTAACATGCGGGGACGTGGAGG | | | |
| | AAAATCCCGGGCCCTGA | | | |

pBP0606--pSFG-k-ΔMyr.iMC.2A-ΔCD19

| | | | | |
|---|---|---|---|---|
| MyD88 | ATGGCTGCAGGAGGTCCCGGCGCGGG | 749 | MAAGGPGAGSAAPVSSTSSLPLAALNMRV | 750 |
| | GTCTGCGGCCCCGGTCTCCTCCACATC | | RRRLSLFLNVRTQVAADWTALAEEMDFEYL | |
| | CTCCCTTCCCCTGGCTGCTCTCAACATG | | EIRQLETQADPTGRLLDAWQGRPGASVGR | |
| | CGAGTGCGGCGCCGCCTGTCTCTGTTC | | LLDLLTKLGRDDVLLELGPSIEEDCQKYILK | |
| | TTGAACGTGCGGACACAGGTGGCGGCC | | QQQEEAEKPLQVAAVDSSVPRTAELAGITT | |
| | GACTGGACCGCGCTGGCGGAGGAGAT | | LDDPLGHMPERFDAFICYCPSDI | |
| | GGACTTTGAGTACTTGGAGATCCGGCAA | | | |
| | CTGGAGACACAAGCGGACCCCACTGGC | | | |
| | AGGCTGCTGGACGCCTGGCAGGGACG | | | |
| | CCCTGGCGCCTCTGTAGGCCGACTGCT | | | |
| | CGATCTGCTTACCAAGCTGGGCCGCGA | | | |
| | CGACGTGCTGCTGGAGCTGGGACCCAG | | | |
| | CATTGAGGAGGATTGCCAAAAGTATATC | | | |
| | TTGAAGCAGCAGCAGGAGGAGGCTGAG | | | |
| | AAGCCTTTACAGGTGGCCGCTGTAGAC | | | |
| | AGCAGTGTCCCACGGACAGCAGAGCTG | | | |
| | GCGGGCATCACCACACTTGATGACCCC | | | |
| | CTGGGGCATATGCCTGAGCGTTTCGAT | | | |
| | GCCTTCATCTGCTATTGCCCCAGCGACA | | | |
| | TC | | | |
| Linker | GTCGAG | 751 | VG | 752 |
| hCD40 | AAAAAGGTGGCCAAGAAGCCAACCAATA | 753 | KKVAKKPTNKAPHPKQEPQEINFPDDLPGS | 754 |
| | AGGCCCCCCACCCCAAGCAGGAGCCCC | | NTAAPVQETLHGCQPVTQEDGKESRISVQ | |
| | AGGAGATCAATTTTCCCGACGATCTTCC | | ERQ | |
| | TGGCTCCAACACTGCTGCTCCAGTGCA | | | |
| | GGAGACTTTACATGGATGCCAACCGGT | | | |
| | CACCCAGGAGGATGGCAAAGAGAGTCG | | | |
| | CATCTCAGTGCAGGAGAGACAG | | | |
| Linker | GTCGAG | 755 | VG | 756 |
| Fv′ | GGCGTCCAAGTCGAAACCATTAGTCCC | 757 | GVQVETISPGDGRTFPKRGQTCVVHYTGM | 758 |
| | GGCGATGGCAGAACATTTCCTAAAAGG | | LEDGKKVDSSRDRNKPFKFMLGKQEVIRG | |
| | GGACAAACATGTGTCGTCCATTATACAG | | WEEGVAQMSVGQRAKLTISPDYAYGATGH | |
| | GCATGTTGGAGGACGGCAAAAAGGTGG | | PGIIPPHATLVFDVELLKLE | |
| | ACAGTAGTAGAGATCGCAATAAACCTTT | | | |
| | CAAATTCATGTTGGGAAAACAAGAAGTC | | | |
| | ATTAGGGGATGGGAGGAGGGCGTGGCT | | | |
| | CAAATGTCCGTCGGCCAACGCGCTAAG | | | |
| | CTCACCATCAGCCCCGACTACGCATAC | | | |
| | GGCGCTACCGGACATCCCGGAATTATT | | | |
| | CCCCCTCACGCTACCTTGGTGTTTGACG | | | |
| | TCGAACTGTTGAAGCTCGAA | | | |
| Linker | GTCGAG | 759 | VG | 760 |
| Fv | GGAGTGCAGGTGGAGACTATCTCCCCA | 761 | GVQVETISPGDGRTFPKRGQTCVVHYTGM | 762 |
| | GGAGACGGGCGCACCTTCCCCAAGCGC | | LEDGKKVDSSRDRNKPFKFMLGKQEVIRG | |
| | GGCCAGACCTGCGTGGTGCACTACACC | | WEEGVAQMSVGQRAKLTISPDYAYGATGH | |
| | GGGATGCTTGAAGATGGAAAGAAAGTT | | PGIIPPHATLVFDVELLKLE | |
| | GATTCCTCCCGGGACAGAAACAAGCCC | | | |
| | TTTAAGTTTATGCTAGGCAAGCAGGAGG | | | |
| | TGATCCGAGGCTGGGAAGAAGGGGTTG | | | |
| | CCCAGATGAGTGTGGGTCAGAGAGCCA | | | |
| | AACTGACTATATCTCCAGATTATGCCTAT | | | |
| | GGTGCCACTGGGCACCCAGGCATCATC | | | |
| | CCACCACATGCCACTCTCGTCTTCGATG | | | |
| | TGGAGCTTCTAAAACTGGAA | | | |
| Linker | CCGCGG | 763 | PR | 764 |
| T2A | GAAGGCCGAGGGAGCCTGCTGACATGT | 765 | EGRGSLLTCGDVEENPGP | 766 |
| | GGCGATGTGGAGGAAAACCCAGGACCA | | | |
| ΔCD19 | ATGCCACCACCTCGCCTGCTGTTCTTTC | 767 | MPPPRLLFFLLFLTPMEVRPEEPLVVKVEE | 768 |
| | TGCTGTTCCTGACACCTATGGAGGTGC | | GDNAVLQCLKGTSDGPTQQLTWSRESPLK | |
| | GACCTGAGGAACCACTGGTCGTGAAGG | | PFLKLSLGLPGLGIHMRPLAIWLFIFNVSQQ | |
| | TCGAGGAAGGCGACAATGCCGTGCTGC | | MGGFYLCQPGPPSEKAWQPGWTVNVEGS | |
| | AGTGCCTGAAAGGCACTTCTGATGGGC | | GELFRWNVSDLGGLGCGLKNRSSEGPSSP | |
| | CAACTCAGCAGCTGACCTGGTCCAGGG | | SGKLMSPKLYVWAKDRPEIWEGEPPCLPP | |
| | AGTCTCCCCTGAAGCCTTTTCTGAAACT | | RDSLNQSLSQDLTMAPGSTLWLSCGVPPD | |
| | GAGCCTGGGACTGCCAGGACTGGGAAT | | SVSRGPLSWTHVHPKGPKSLLSLELKDDR | |
| | CCACATGCGCCCTCTGGCTATCTGGCT | | PARDMWVMETGLLLPRATAQDAGKYYCH | |
| | GTTCATCTTCAACGTGAGCCAGCAGATG | | RGNLTMSFHLEITARPVLWHWLLRTGGWK | |
| | GGAGGATTCTACCTGTGCCAGCCAGGA | | VSAVTLAYLIFCLCSLVGILHLQRALVLRRKR | |
| | CCACCATCCGAGAAGGCCTGGCAGCCT | | KRMTDPTRRF* | |
| | GGATGGACCGTCAACGTGGAGGGGTCT | | | |
| | GGAGAACTGTTTAGGTGGAATGTGAGT | | | |
| | GACCTGGGAGGACTGGGATGTGGGCTG | | | |
| | AAGAACCGCTCCTCTGAAGGCCCAAGTT | | | |
| | CACCCTCAGGGAAGCTGATGAGCCCAA | | | |
| | AACTGTACGTGTGGGCCAAAGATCGGC | | | |
| | CCGAGATCTGGGAGGGAGAACCTCCAT | | | |
| | GCCTGCCACCTAGAGACAGCCTGAATC | | | |
| | AGAGTCTGTCACAGGATCTGACAATGGC | | | |
| | CCCCGGGTCCACTCTGTGGCTGTCTTG | | | |
| | TGGAGTCCCACCCGACAGCGTGTCCAG | | | |
| | AGGCCCTCTGTCCTGGACCCACGTGCA | | | |
| | TCCTAAGGGGCCAAAAAGTCTGCTGTCA | | | |
| | CTGGAACTGAAGGACGATCGGCCTGCC | | | |
| | AGAGACATGTGGGTCATGGAGACTGGA | | | |
| | CTGCTGCTGCCACGAGCAACCGCACAG | | | |
| | GATGCTGGAAAATACTATTGCCACCGGG | | | |
| | GCAATCTGACAATGTCCTTCCATCTGGA | | | |
| | GATCACTGCAAGGCCCGTGCTGTGGCA | | | |
| | CTGGCTGCTGCGAACCGGAGGATGGAA | | | |
| | GGTCAGTGCTGTGACACTGGCATATCTG | | | |
| | ATCTTTTGCCTGTGCTCCCTGGTGGGCA | | | |
| | TTCTGCATCTGCAGAGAGCCCTGGTGCT | | | |
| | GCGGAGAAAGAGAAAGAGAATGACTGA | | | |
| | CCCAACAAGAAGGTTTTGA | | | |

pBP0607--pSFG-k-iMC.2A-ΔCD19

| | | | | |
|---|---|---|---|---|
| Myr | ATGGGGAGTAGCAAGAGCAAGCCTAAG | 769 | MGSSKSKPKDPSQR | 770 |
| | GACCCCAGCCAGCGC | | | |
| Linker | CTCGAC | 771 | LN | 772 |
| MyD88 | ATGGCTGCAGGAGGTCCCGGCGCGGG | 773 | MAAGGPGAGSAAPVSSTSSLPLAALNMRV | 774 |
| | GTCTGCGGCCCCGGTCTCCTCCACATC | | RRRLSLFLNVRTQVAADWTALAEEMDFEYL | |
| | CTCCCTTCCCCTGGCTGCTCTCAACATG | | EIRQLETQADPTGRLLDAWQGRPGASVGR | |
| | CGAGTGCGGCGCCGCCTGTCTCTGTTC | | LLDLLTKLGRDDVLLELGPSIEEDCQKYILK | |
| | TTGAACGTGCGGACACAGGTGGCGGCC | | QQQEEAEKPLQVAAVDSSVPRTAELAGITT | |
| | GACTGGACCGCGCTGGCGGAGGAGAT | | LDDPLGHMPERFDAFICYCPSDI | |
| | GGACTTTGAGTACTTGGAGATCCGGCAA | | | |
| | CTGGAGACACAAGCGGACCCCACTGGC | | | |
| | AGGCTGCTGGACGCCTGGCAGGGACG | | | |
| | CCCTGGCGCCTCTGTAGGCCGACTGCT | | | |
| | CGATCTGCTTACCAAGCTGGGCCGCGA | | | |
| | CGACGTGCTGCTGGAGCTGGGACCCAG | | | |
| | CATTGAGGAGGATTGCCAAAAGTATATC | | | |
| | TTGAAGCAGCAGCAGGAGGAGGCTGAG | | | |
| | AAGCCTTTACAGGTGGCCGCTGTAGAC | | | |
| | AGCAGTGTCCCACGGACAGCAGAGCTG | | | |
| | GCGGGCATCACCACACTTGATGACCCC | | | |
| | CTGGGGCATATGCCTGAGCGTTTCGAT | | | |
| | GCCTTCATCTGCTATTGCCCCAGCGACA | | | |
| | TC | | | |
| Linker | GTCGAG | 775 | VG | 776 |
| hCD40 | AAAAAGGTGGCCAAGAAGCCAACCAATA | 777 | KKVAKKPTNKAPHPKQEPQEINFPDDLPGS | 778 |
| | AGGCCCCCCACCCCAAGCAGGAGCCCC | | NTAAPVQETLHGCQPVTQEDGKESRISVQ | |
| | AGGAGATCAATTTTCCCGACGATCTTCC | | ERQ | |
| | TGGCTCCAACACTGCTGCTCCAGTGCA | | | |
| | GGAGACTTTACATGGATGCCAACCGGT | | | |
| | CACCCAGGAGGATGGCAAAGAGAGTCG | | | |
| | CATCTCAGTGCAGGAGAGACAG | | | |
| Linker | GTCGAG | 779 | VG | 780 |
| Fv′ | GGCGTCCAAGTCGAAACCATTAGTCCC | 781 | GVQVETISPGDGRTFPKRGQTCVVHYTGM | 782 |
| | GGCGATGGCAGAACATTTCCTAAAAGG | | LEDGKKVDSSRDRNKPFKFMLGKQEVIRG | |
| | GGACAAACATGTGTCGTCCATTATACAG | | WEEGVAQMSVGQRAKLTISPDYAYGATGH | |
| | GCATGTTGGAGGACGGCAAAAAGGTGG | | PGIIPPHATLVFDVELLKLE | |
| | ACAGTAGTAGAGATCGCAATAAACCTTT | | | |
| | CAAATTCATGTTGGGAAAACAAGAAGTC | | | |
| | ATTAGGGGATGGGAGGAGGGCGTGGCT | | | |
| | CAAATGTCCGTCGGCCAACGCGCTAAG | | | |
| | CTCACCATCAGCCCCGACTACGCATAC | | | |
| | GGCGCTACCGGACATCCCGGAATTATT | | | |
| | CCCCCTCACGCTACCTTGGTGTTTGACG | | | |
| | TCGAACTGTTGAAGCTCGAA | | | |
| Linker | GTCGAG | 783 | VG | 784 |
| Fv | GGAGTGCAGGTGGAGACTATCTCCCCA | 785 | GVQVETISPGDGRTFPKRGQTCVVHYTGM | 786 |
| | GGAGACGGGCGCACCTTCCCCAAGCGC | | LEDGKKVDSSRDRNKPFKFMLGKQEVIRG | |
| | GGCCAGACCTGCGTGGTGCACTACACC | | WEEGVAQMSVGQRAKLTISPDYAYGATGH | |
| | GGGATGCTTGAAGATGGAAAGAAAGTT | | PGIIPPHATLVFDVELLKLE | |
| | GATTCCTCCCGGGACAGAAACAAGCCC | | | |
| | TTTAAGTTTATGCTAGGCAAGCAGGAGG | | | |
| | TGATCCGAGGCTGGGAAGAAGGGGTTG | | | |
| | CCCAGATGAGTGTGGGTCAGAGAGCCA | | | |
| | AACTGACTATATCTCCAGATTATGCCTAT | | | |
| | GGTGCCACTGGGCACCCAGGCATCATC | | | |
| | CCACCACATGCCACTCTCGTCTTCGATG | | | |
| | TGGAGCTTCTAAAACTGGAA | | | |
| Linker | CCGCGG | 787 | PR | 788 |
| T2A | GAAGGCCGAGGGAGCCTGCTGACATGT | 789 | EGRGSLLTCGDVEENPGP | 790 |
| | GGCGATGTGGAGGAAAACCCAGGACCA | | | |
| ΔCD19 | ATGCCACCACCTCGCCTGCTGTTCTTTC | 791 | MPPPRLLFFLLFLTPMEVRPEEPLVVKVEE | 792 |
| | TGCTGTTCCTGACACCTATGGAGGTGC | | GDNAVLQCLKGTSDGPTQQLTWSRESPLK | |
| | GACCTGAGGAACCACTGGTCGTGAAGG | | PFLKLSLGLPGLGIHMRPLAIWLFIFNVSQQ | |
| | TCGAGGAAGGCGACAATGCCGTGCTGC | | MGGFYLCQPGPPSEKAWQPGWTVNVEGS | |
| | AGTGCCTGAAAGGCACTTCTGATGGGC | | GELFRWNVSDLGGLGCGLKNRSSEGPSSP | |
| | CAACTCAGCAGCTGACCTGGTCCAGGG | | SGKLMSPKLYVWAKDRPEIWEGEPPCLPP | |
| | AGTCTCCCCTGAAGCCTTTTCTGAAACT | | RDSLNQSLSQDLTMAPGSTLWLSCGVPPD | |
| | GAGCCTGGGACTGCCAGGACTGGGAAT | | SVSRGPLSWTHVHPKGPKSLLSLELKDDR | |
| | CCACATGCGCCCTCTGGCTATCTGGCT | | PARDMWVMETGLLLPRATAQDAGKYYCH | |
| | GTTCATCTTCAACGTGAGCCAGCAGATG | | RGNLTMSFHLEITARPVLWHWLLRTGGWK | |
| | GGAGGATTCTACCTGTGCCAGCCAGGA | | VSAVTLAYLIFCLCSLVGILHLQRALVLRRKR | |
| | CCACCATCCGAGAAGGCCTGGCAGCCT | | KRMTDPTRRF* | |
| | GGATGGACCGTCAACGTGGAGGGGTCT | | | |
| | GGAGAACTGTTTAGGTGGAATGTGAGT | | | |
| | GACCTGGGAGGACTGGGATGTGGGCTG | | | |
| | AAGAACCGCTCCTCTGAAGGCCCAAGTT | | | |
| | CACCCTCAGGGAAGCTGATGAGCCCAA | | | |
| | AACTGTACGTGTGGGCCAAAGATCGGC | | | |
| | CCGAGATCTGGGAGGGAGAACCTCCAT | | | |
| | GCCTGCCACCTAGAGACAGCCTGAATC | | | |
| | AGAGTCTGTCACAGGATCTGACAATGGC | | | |
| | CCCCGGGTCCACTCTGTGGCTGTCTTG | | | |
| | TGGAGTCCCACCCGACAGCGTGTCCAG | | | |
| | AGGCCCTCTGTCCTGGACCCACGTGCA | | | |
| | TCCTAAGGGGCCAAAAAGTCTGCTGTCA | | | |
| | CTGGAACTGAAGGACGATCGGCCTGCC | | | |
| | AGAGACATGTGGGTCATGGAGACTGGA | | | |
| | CTGCTGCTGCCACGAGCAACCGCACAG | | | |
| | GATGCTGGAAAATACTATTGCCACCGGG | | | |
| | GCAATCTGACAATGTCCTTCCATCTGGA | | | |
| | GATCACTGCAAGGCCCGTGCTGTGGCA | | | |
| | CTGGCTGCTGCGAACCGGAGGATGGAA | | | |
| | GGTCAGTGCTGTGACACTGGCATATCTG | | | |
| | ATCTTTTGCCTGTGCTCCCTGGTGGGCA | | | |
| | TTCTGCATCTGCAGAGAGCCCTGGTGCT | | | |
| | GCGGAGAAAGAGAAAGAGAATGACTGA | | | |
| | CCCAACAAGAAGGTTTTGA | | | |

pBP0668--pSFG-FRB_{I}x2.Caspase9.2A-Q.8stm.CD3zeta

| | | | | |
|---|---|---|---|---|
| FRB_{I}′ | TGGCATGAAGGCCTGGAAGAGGCATCT | 793 | WHEGLEEASRLYFGERNVKGMFEVLEPLHA | 794 |
| | CGTTTGTACTTTGGGGAAAGGAACGTGA | | MMERGPQTLKETSFNQAYGRDLMEAQEWC | |
| | AAGGCATGTTTGAGGTGCTGGAGCCCT | | RKYMKSGNVKDLLQAWDLYYHVFRRISK | |
| | TGCACGCTATGATGGAACGGGGCCCCC | | | |
| | AGACTCTGAAGGAAACATCCTTTAATCA | | | |
| | GGCCTATGGTCGAGATTTAATGGAGGC | | | |
| | CCAAGAGTGGTGCAGGAAGTACATGAA | | | |
| | ATCAGGGAATGTCAAGGACCTCCTCCAA | | | |
| | GCCTGGGACCTCTATTATCATGTGTTCC | | | |
| | GACGAATCTCAAAG | | | |
| Linker | GTCGAG | 795 | VG | 796 |
| FRB_{I} | TGGCATGAAGGGTTGGAAGAAGCTTCA | 797 | WHEGLEEASRLYFGERNVKGMFEVLEPLHA | 798 |
| | AGGCTGTACTTCGGAGAGAGGAACGTG | | MMERGPQTLKETSFNQAYGRDLMEAQEWC | |
| | AAGGGCATGTTTGAGGTTCTTGAACCTC | | RKYMKSGNVKDLLQAWDLYYHVFRRISK | |
| | TGCACGCCATGATGGAACGGGGACCGC | | | |
| | AGACACTGAAAGAAACCTCTTTTAATCA | | | |
| | GGCCTACGGCAGAGACCTGATGGAGGC | | | |
| | CCAAGAATGGTGTAGAAAGTATATGAAA | | | |
| | TCCGGTAACGTGAAAGACCTGCTCCAG | | | |
| | GCCTGGGACCTTTATTACCATGTGTTCA | | | |
| | GGCGGATCAGTAAG | | | |
| Linker | TCAGGCGGTGGCTCAGGT | 799 | SGGGSG | 800 |
| ΔCaspase9 | TCGACGGATTTGGTGATGTCGGTGCTCT | 801 | DGFGDVGALESLRGNADLAYILSMEPCGHCL | 802 |
| | TGAGAGTTTGAGGGGAAATGCAGATTTG | | IINNVNFCRESGLRTRTGSNIDCEKLRRRFSS | |
| | GCTTACATCCTGAGCATGGAGCCCTGT | | LHFMVEVKGDLTAKKMVLALLELARQDHGAL | |
| | GGCCACTGCCTCATTATCAACAATGTGA | | DCCVVVILSHGCQASHLQFPGAVYGTDGCP | |
| | ACTTCTGCCGTGAGTCCGGGCTCCGCA | | VSVEKIVNIFNGTSCPSLGGKPKLFFIQACGG | |
| | CCCGCACTGGCTCCAACATCGACTGTG | | EQKDHGFEVASTSPEDESPGSNPEPDATPF | |
| | AGAAGTTGCGGCGTCGCTTCTCCTCGC | | QEGLRTFDQLDAISSLPTPSDIFVSYSTFPGF | |
| | TGCATTTCATGGTGGAGGTGAAGGGCG | | VSWRDPKSGSWYVETLDDIFEQWAHSEDLQ | |
| | ACCTGACTGCCAAGAAAATGGTGCTGG | | SLLLRVANAVSVKGIYKQMPGCFNFLRKKLF | |
| | CTTTGCTGGAGCTGGCGCGGCAGGACC | | FKTSASRA | |
| | ACGGTGCTCTGGACTGCTGCGTGGTGG | | | |
| | TCATTCTCTCTCACGGCTGTCAGGCCAG | | | |
| | CCACCTGCAGTTCCCAGGGGCTGTCTA | | | |
| | CGGCACAGATGGATGCCCTGTGTCGGT | | | |
| | CGAGAAGATTGTGAACATCTTCAATGGG | | | |
| | ACCAGCTGCCCCAGCCTGGGAGGGAAG | | | |
| | CCCAAGCTCTTTTTCATCCAGGCCTGTG | | | |
| | GTGGGGAGCAGAAAGACCATGGGTTTG | | | |
| | AGGTGGCCTCCACTTCCCCTGAAGACG | | | |
| | AGTCCCCTGGCAGTAACCCCGAGCCAG | | | |
| | ATGCCACCCCGTTCCAGGAAGGTTTGA | | | |
| | GGACCTTCGACCAGCTGGACGCCATAT | | | |
| | CTAGTTTGCCCACACCCAGTGACATCTT | | | |
| | TGTGTCCTACTCTACTTTCCCAGGTTTT | | | |
| | GTTTCCTGGAGGGACCCCAAGAGTGGC | | | |
| | TCCTGGTACGTTGAGACCCTGGACGAC | | | |
| | ATCTTTGAGCAGTGGGCTCACTCTGAAG | | | |
| | ACCTGCAGTCCCTCCTGCTTAGGGTCG | | | |
| | CTAATGCTGTTTCGGTGAAAGGGATTTA | | | |
| | TAAACAGATGCCTGGTTGCTTTAATTTC | | | |
| | CTCCGGAAAAAACTTTTCTTTAAAACATC | | | |
| | AGCTAGCAGAGCC | | | |
| Linker | CCGCGG | 803 | PR | 804 |
| T2A | GAAGGCCGAGGGAGCCTGCTGACATGT | 805 | EGRGSLLTCGDVEENPGP | 806 |
| | GGCGATGTGGAGGAAAACCCAGGACCA | | | |
| Signal Peptide | ATGGAATTTGGCCTCTCCTGGTTGTTTC | 807 | MEFGLSWLFLVAILKGVQCSR | 808 |
| | TCGTGGCCATTCTTAAGGGTGTGCAGTG | | | |
| | CTCCAGA | | | |
| Linker | ATGCAT | 809 | MH | 810 |
| Q-Bend (CD34 | GAACTTCCTACTCAGGGGACTTTCTCAA | 811 | ELPTQGTFSNVSTNVS | 812 |
| Epitope) | ACGTTAGCACAAACGTAAGT | | | |
| CD8 Stalk | CCCGCCCCAAGACCCCCCACACCTGCG | 813 | PAPRPPTPAPTIASQPLSLRPEACRPAAGGA | 814 |
| | CCGACCATTGCTTCTCAACCCCTGAGTT | | VHTRGLDFACD | |
| | TGAGACCCGAGGCCTGCCGGCCAGCTG | | | |
| | CCGGCGGGGCCGTGCATACAAGAGGAC | | | |
| | TCGATTTCGCTTGCGAC | | | |
| CD8a tm | ATCTATATCTGGGCACCTCTCGCTGGCA | 815 | IYIWAPLAGTCGVLLLSLVITLYCNHRNRRRV | 816 |
| | CCTGTGGAGTCCTTCTGCTCAGCCTGGT | | CKCPRVD | |
| | TATTACTCTGTACTGTAATCACCGGAAT | | | |
| | CGCCGCCGCGTTTGTAAGTGTCCCAGG | | | |
| | GTCGAC | | | |
| CD3 zeta | AGAGTGAAGTTCAGCAGGAGCGCAGAC | 817 | RVKFSRSADAPAYQQGQNQLYNELNLGRRE | 818 |
| | GCCCCCGCGTACCAGCAGGGCCAGAAC | | EYDVLDKRRGRDPEMGGKPRRKNPQEGLY | |
| | CAGCTCTATAACGAGCTCAATCTAGGAC | | NELQKDKMAEAYSEIGMKGERRRGKGHDGL | |
| | GAAGAGAGGAGTACGATGTTTTGGACAA | | YQGLSTATKDTYDALHMQALPP | |
| | GAGACGTGGCCGGGACCCTGAGATGG | | | |
| | GGGGAAAGCCGAGAAGGAAGAACCCTC | | | |
| | AGGAAGGCCTGTACAATGAACTGCAGA | | | |
| | AAGATAAGATGGCGGAGGCCTACAGTG | | | |
| | AGATTGGGATGAAAGGCGAGCGCCGGA | | | |
| | GGGGCAAGGGGCACGATGGCCTTTACC | | | |
| | AGGGTCTCAGTACAGCCACCAAGGACA | | | |
| | CCTACGACGCCCTTCACATGCAAGCTCT | | | |
| | TCCACCTCG | | | |

pBP0608--pSFG-ΔMyr.iMC.2A-ΔCD19.Q.8stm.CD3zeta

| | | | | |
|---|---|---|---|---|
| MyD88 | ATGGCTGCAGGAGGTCCCGGCGCGGGGTC | 819 | MAAGGPGAGSAAPVSSTSSLPLAALNMRVR | 820 |
| | TGCGGCCCCGGTCTCCTCCACATCCTCCCT | | RRLSLFLNVRTQVAADWTALAEEMDFEYLEI | |
| | TCCCCTGGCTGCTCTCAACATGCGAGTGCG | | RQLETQADPTGRLLDAWQGRPGASVGRLLD | |
| | GCGCCGCCTGTCTCTGTTCTTGAACGTGCG | | LLTKLGRDDVLLELGPSIEEDCQKYILKQQQE | |
| | GACACAGGTGGCGGCCGACTGGACCGCGC | | EAEKPLQVAAVDSSVPRTAELAGITTLDDPL | |
| | TGGCGGAGGAGATGGACTTTGAGTACTTGG | | GHMPERFDAFICYCPSDI | |
| | AGATCCGGCAACTGGAGACACAAGCGGAC | | | |
| | CCCACTGGCAGGCTGCTGGACGCCTGGCA | | | |
| | GGGACGCCCTGGCGCCTCTGTAGGCCGAC | | | |
| | TGCTCGATCTGCTTACCAAGCTGGGCCGCG | | | |
| | ACGACGTGCTGCTGGAGCTGGGACCCAGC | | | |
| | ATTGAGGAGGATTGCCAAAAGTATATCTTGA | | | |
| | AGCAGCAGCAGGAGGAGGCTGAGAAGCCT | | | |
| | TTACAGGTGGCCGCTGTAGACAGCAGTGTC | | | |
| | CCACGGACAGCAGAGCTGGGGGGCATCAC | | | |
| | CACACTTGATGACCCCCTGGGGCATATGCC | | | |
| | TGAGCGTTTCGATGCCTTCATCTGCTATTGC | | | |
| | CCCAGCGACATC | | | |
| Linker | GTCGAG | 821 | VE | 822 |
| hCD40 | AAAAAGGTGGCCAAGAAGCCAACCAATAAG | 823 | KKVAKKPTNKAPHPKQEPQEINFPDDLPGSN | 824 |
| | GCCCCCCACCCCAAGCAGGAGCCCCAGGA | | TAAPVQETLHGCQPVTQEDGKESRISVQER | |
| | GATCAATTTTCCCGACGATCTTCCTGGCTCC | | Q | |
| | AACACTGCTGCTCCAGTGCAGGAGACTTTA | | | |
| | CATGGATGCCAACCGGTCACCCAGGAGGAT | | | |
| | GGCAAAGAGAGTCGCATCTCAGTGCAGGA | | | |
| | GAGACAG | | | |
| Linker | GTCGAG | 825 | VE | 826 |
| Fv′ | GGCGTCCAAGTCGAAACCATTAGTCCCGGC | 827 | GVQVETISPGDGRTFPKRGQTCVVHYTGML | 828 |
| | GATGGCAGAACATTTCCTAAAAGGGGACAA | | EDGKKVDSSRDRNKPFKFMLGKQEVIRGWE | |
| | ACATGTGTCGTCCATTATACAGGCATGTTG | | EGVAQMSVGQRAKLTISPDYAYGATGHPGII | |
| | GAGGACGGCAAAAAGGTGGACAGTAGTAG | | PPHATLVFDVELLKLE | |
| | AGATCGCAATAAACCTTTCAAATTCATGTTG | | | |
| | GGAAAACAAGAAGTCATTAGGGGATGGGAG | | | |
| | GAGGGCGTGGCTCAAATGTCCGTCGGCCA | | | |
| | ACGCGCTAAGCTCACCATCAGCCCCGACTA | | | |
| | CGCATACGGCGCTACCGGACATCCCGGAAT | | | |
| | TATTCCCCCTCACGCTACCTTGGTGTTTGAC | | | |
| | GTCGAACTGTTGAAGCTCGAA | | | |
| Linker | GTCGAG | 829 | VE | 830 |
| Fv | GGAGTGCAGGTGGAGACTATCTCCCCAGG | 831 | GVQVETISPGDGRTFPKRGQTCVVHYTGML | 832 |
| | AGACGGGCGCACCTTCCCCAAGCGCGGCC | | EDGKKVDSSRDRNKPFKFMLGKQEVIRGWE | |
| | AGACCTGCGTGGTGCACTACACCGGGATG | | EGVAQMSVGQRAKLTISPDYAYGATGHPGII | |
| | CTTGAAGATGGAAAGAAAGTTGATTCCTCC | | PPHATLVFDVELLKLE | |
| | CGGGACAGAAACAAGCCCTTTAAGTTTATG | | | |
| | CTAGGCAAGCAGGAGGTGATCCGAGGCTG | | | |
| | GGAAGAAGGGGTTGCCCAGATGAGTGTGG | | | |
| | GTCAGAGAGCCAAACTGACTATATCTCCAG | | | |
| | ATTATGCCTATGGTGCCACTGGGCACCCAG | | | |
| | GCATCATCCCACCACATGCCACTCTCGTCT | | | |
| | TCGATGTGGAGCTTCTAAAACTGGAA | | | |
| Linker | CCGCGG | 833 | PR | 834 |
| T2A | GAAGGCCGAGGGAGCCTGCTGACATGTGG | 835 | EGRGSLLTCGDVEENPGP | 836 |
| | CGATGTGGAGGAAAACCCAGGACCA | | | |
| Linker | CCATGG | 837 | PW | 838 |
| Signal Peptide | ATGGAGTTTGGACTTTCTTGGTTGTTTTTGG | 839 | MEFGLSWLFLVAILKGVQCSR | 840 |
| | TGGCAATTCTGAAGGGTGTCCAGTGTAGCA | | | |
| | GG | | | |
| FMC63-VL | GACATCCAGATGACACAGACTACATCCTCC | 841 | DIQMTQTTSSLSASLGDRVTISCRASQDISKY | 842 |
| | CTGTCTGCCTCTCTGGGAGACAGAGTCACC | | LNWYQQKPDGTVKLLIYHTSRLHSGVPSRFS | |
| | ATCAGTTGCAGGGCAAGTCAGGACATTAGT | | GSGSGTDYSLTISNLEQEDIATYFCQQGNTL | |
| | AAATATTTAAATTGGTATCAGCAGAAACCAG | | PYTFGGGTKLEIT | |
| | ATGGAACTGTTAAACTCCTGATCTACCATAC | | | |
| | ATCAAGATTACACTCAGGAGTCCCATCAAG | | | |
| | GTTCAGTGGCAGTGGGTCTGGAACAGATTA | | | |
| | TTCTCTCACCATTAGCAACCTGGAGCAAGA | | | |
| | AGATATTGCCACTTACTTTTGCCAACAGGGT | | | |
| | AATACGCTTCCGTACACGTTCGGAGGGGGG | | | |
| | ACTAAGTTGGAAATAACA | | | |
| Flex Linker | GGCGGAGGAAGCGGAGGTGGGGGC | 843 | GGGSGGGG | 844 |
| FMC63-VH | GAGGTGAAACTGCAGGAGTCAGGACCTGG | 845 | EVKLQESGPGLVAPSQSLSVTCTVSGVSLPD | 846 |
| | CCTGGTGGCGCCCTCACAGAGCCTGTCCG | | YGVSWIRQPPRKGLEWLGVIWGSETTYYNS | |
| | TCACATGCACTGTCTCAGGGGTCTCATTAC | | ALKSRLTIIKDNSKSQVFLKMNSLQTDDTAIY | |
| | CCGACTATGGTGTAAGCTGGATTCGCCAGC | | YCAKHYYYGGSYAMDYWGQGTSVTVSS | |
| | CTCCACGAAAGGGTCTGGAGTGGCTGGGA | | | |
| | GTAATATGGGGTAGTGAAACCACATACTATA | | | |
| | ATTCAGCTCTCAAATCCAGACTGACCATCAT | | | |
| | CAAGGACAACTCCAAGAGCCAAGTTTTCTTA | | | |
| | AAAATGAACAGTCTGCAAACTGATGACACA | | | |
| | GCCATTTACTACTGTGCCAAACATTATTACT | | | |
| | ACGGTGGTAGCTATGCTATGGACTACTGGG | | | |
| | GTCAAGGAACCTCAGTCACCGTCTCCTCA | | | |
| Linker | GGATCC | 847 | GS | 848 |
| Q-Bend (CD34 | GAACTTCCTACTCAGGGGACTTTCTCAAAC | 849 | ELPTQGTFSNVSTNVS | 850 |
| Epitope) | GTTAGCACAAACGTAAGT | | | |
| CD8 Stalk | CCCGCCCCAAGACCCCCCACACCTGCGCC | 851 | PAPRPPTPAPTIASQPLSLRPEACRPAAGGA | 852 |
| | GACCATTGCTTCTCAACCCCTGAGTTTGAG | | VHTRGLDFACD | |
| | ACCCGAGGCCTGCCGGCCAGCTGCCGGCG | | | |
| | GGGCCGTGCATACAAGAGGACTCGATTTCG | | | |
| | CTTGCGAC | | | |
| CD8a tm | ATCTATATCTGGGCACCTCTCGCTGGCACC | 853 | IYIWAPLAGTCGVLLLSLVITLYCNHRNRRRV | 854 |
| | TGTGGAGTCCTTCTGCTCAGCCTGGTTATTA | | CKCPR | |
| | CTCTGTACTGTAATCACCGGAATCGCCGCC | | | |
| | GCGTTTGTAAGTGTCCCAGG | | | |
| Linker | GTCGAC | 855 | VD | 856 |
| CD3 zeta | AGAGTGAAGTTCAGCAGGAGCGCAGACGC | 857 | RVKFSRSADAPAYQQGQNQLYNELNLGRRE | 858 |
| | CCCCGCGTACCAGCAGGGCCAGAACCAGC | | EYDVLDKRRGRDPEMGGKPRRKNPQEGLY | |
| | TCTATAACGAGCTCAATCTAGGACGAAGAG | | NELQKDKMAEAYSEIGMKGERRRGKGHDGL | |
| | AGGAGTACGATGTTTTGGACAAGAGACGTG | | YQGLSTATKDTYDALHMQALPP | |
| | GCCGGGACCCTGAGATGGGGGGAAAGCCG | | | |
| | AGAAGGAAGAACCCTCAGGAAGGCCTGTAC | | | |
| | AATGAACTGCAGAAAGATAAGATGGCGGAG | | | |
| | GCCTACAGTGAGATTGGGATGAAAGGCGAG | | | |
| | CGCCGGAGGGGCAAGGGGCACGATGGCCT | | | |
| | TTACCAGGGTCTCAGTACAGCCACCAAGGA | | | |
| | CACCTACGACGCCCTTCACATGCAAGCTCT | | | |
| | TCCACCTCG | | | |

pBP0609: pSFG-iMC.2A-ΔCD19.Q.8stm.CD3zeta

| | | | | |
|---|---|---|---|---|
| Myr | ATGGGGAGTAGCAAGAGCAAGCCTAAGGA | 859 | MGSSKSKPKDPSQR | 860 |
| | CCCCAGCCAGCGC | | | |
| Linker | CTCGAC | 861 | LD | 862 |
| MyD88 | ATGGCTGCAGGAGGTCCCGGCGCGGGGTC | 863 | MAAGGPGAGSAAPVSSTSSLPLAALNMRVR | 864 |
| | TGCGGCCCCGGTCTCCTCCACATCCTCCCT | | RRLSLFLNVRTQVAADWTALAEEMDFEYLEI | |
| | TCCCCTGGCTGCTCTCAACATGCGAGTGCG | | RQLETQADPTGRLLDAWQGRPGASVGRLLD | |
| | GCGCCGCCTGTCTCTGTTCTTGAACGTGCG | | LLTKLGRDDVLLELGPSIEEDCQKYILKQQQE | |
| | GACACAGGTGGCGGCCGACTGGACCGCGC | | EAEKPLQVAAVDSSVPRTAELAGITTLDDPL | |
| | TGGCGGAGGAGATGGACTTTGAGTACTTGG | | GHMPERFDAFICYCPSDI | |
| | AGATCCGGCAACTGGAGACACAAGCGGAC | | | |
| | CCCACTGGCAGGCTGCTGGACGCCTGGCA | | | |
| | GGGACGCCCTGGCGCCTCTGTAGGCCGAC | | | |
| | TGCTCGATCTGCTTACCAAGCTGGGCCGCG | | | |
| | ACGACGTGCTGCTGGAGCTGGGACCCAGC | | | |
| | ATTGAGGAGGATTGCCAAAAGTATATCTTGA | | | |
| | AGCAGCAGCAGGAGGAGGCTGAGAAGCCT | | | |
| | TTACAGGTGGCCGCTGTAGACAGCAGTGTC | | | |
| | CCACGGACAGCAGAGCTGGCGGGCATCAC | | | |
| | CACACTTGATGACCCCCTGGGGCATATGCC | | | |
| | TGAGCGTTTCGATGCCTTCATCTGCTATTGC | | | |
| | CCCAGCGACATC | | | |
| Linker | GTCGAG | 865 | VE | 866 |
| hCD40 | AAAAAGGTGGCCAAGAAGCCAACCAATAAG | 867 | KKVAKKPTNKAPHPKQEPQEINFPDDLPGSN | 868 |
| | GCCCCCCACCCCAAGCAGGAGCCCCAGGA | | TAAPVQETLHGCQPVTQEDGKESRISVQER | |
| | GATCAATTTTCCCGACGATCTTCCTGGCTCC | | Q | |
| | AACACTGCTGCTCCAGTGCAGGAGACTTTA | | | |
| | CATGGATGCCAACCGGTCACCCAGGAGGAT | | | |
| | GGCAAAGAGAGTCGCATCTCAGTGCAGGA | | | |
| | GAGACAG | | | |
| Linker | GTCGAG | 869 | VE | 870 |
| Fv′ | GGCGTCCAAGTCGAAACCATTAGTCCCGGC | 871 | GVQVETISPGDGRTFPKRGQTCVVHYTGML | 872 |
| | GATGGCAGAACATTTCCTAAAAGGGGACAA | | EDGKKVDSSRDRNKPFKFMLGKQEVIRGWE | |
| | ACATGTGTCGTCCATTATACAGGCATGTTG | | EGVAQMSVGQRAKLTISPDYAYGATGHPGII | |
| | GAGGACGGCAAAAAGGTGGACAGTAGTAG | | PPHATLVFDVELLKLE | |
| | AGATCGCAATAAACCTTTCAAATTCATGTTG | | | |
| | GGAAAACAAGAAGTCATTAGGGGATGGGAG | | | |
| | GAGGGCGTGGCTCAAATGTCCGTCGGCCA | | | |
| | ACGCGCTAAGCTCACCATCAGCCCCGACTA | | | |
| | CGCATACGGCGCTACCGGACATCCCGGAAT | | | |
| | TATTCCCCCTCACGCTACCTTGGTGTTTGAC | | | |
| | GTCGAACTGTTGAAGCTCGAA | | | |
| Linker | GTCGAG | 873 | VE | 874 |
| Fv | GGAGTGCAGGTGGAGACTATCTCCCCAGG | 875 | GVQVETISPGDGRTFPKRGQTCVVHYTGML | 876 |
| | AGACGGGCGCACCTTCCCCAAGCGCGGCC | | EDGKKVDSSRDRNKPFKFMLGKQEVIRGWE | |
| | AGACCTGCGTGGTGCACTACACCGGGATG | | EGVAQMSVGQRAKLTISPDYAYGATGHPGII | |
| | CTTGAAGATGGAAAGAAAGTTGATTCCTCC | | PPHATLVFDVELLKLE | |
| | CGGGACAGAAACAAGCCCTTTAAGTTTATG | | | |
| | CTAGGCAAGCAGGAGGTGATCCGAGGCTG | | | |
| | GGAAGAAGGGGTTGCCCAGATGAGTGTGG | | | |
| | GTCAGAGAGCCAAACTGACTATATCTCCAG | | | |
| | ATTATGCCTATGGTGCCACTGGGCACCCAG | | | |
| | GCATCATCCCACCACATGCCACTCTCGTCT | | | |
| | TCGATGTGGAGCTTCTAAAACTGGAA | | | |
| Linker | CCGCGG | 877 | PR | 878 |
| T2A | GAAGGCCGAGGGAGCCTGCTGACATGTGG | 879 | EGRGSLLTCGDVEENPGP | 880 |
| | CGATGTGGAGGAAAACCCAGGACCA | | | |
| Linker | CCATGG | 881 | PW | 882 |
| Signal Peptide | ATGGAGTTTGGACTTTCTTGGTTGTTTTTGG | 883 | MEFGLSWLFLVAILKGVQCSR | 884 |
| | TGGCAATTCTGAAGGGTGTCCAGTGTAGCA | | | |
| | GG | | | |
| FMC63-VL | GACATCCAGATGACACAGACTACATCCTCC | 885 | DIQMTQTTSSLSASLGDRVTISCRASQDISKY | 886 |
| | CTGTCTGCCTCTCTGGGAGACAGAGTCACC | | LNWYQQKPDGTVKLLIYHTSRLHSGVPSRFS | |
| | ATCAGTTGCAGGGCAAGTCAGGACATTAGT | | GSGSGTDYSLTISNLEQEDIATYFCQQGNTL | |
| | AAATATTTAAATTGGTATCAGCAGAAACCAG | | PYTFGGGTKLEIT | |
| | ATGGAACTGTTAAACTCCTGATCTACCATAC | | | |
| | ATCAAGATTACACTCAGGAGTCCCATCAAG | | | |
| | GTTCAGTGGCAGTGGGTCTGGAACAGATTA | | | |
| | TTCTCTCACCATTAGCAACCTGGAGCAAGA | | | |
| | AGATATTGCCACTTACTTTTGCCAACAGGGT | | | |
| | AATACGCTTCCGTACACGTTCGGAGGGGGG | | | |
| | ACTAAGTTGGAAATAACA | | | |
| Flex Linker | GGCGGAGGAAGCGGAGGTGGGGGC | 887 | GGGSGGGG | 888 |
| FMC63-VH | GAGGTGAAACTGCAGGAGTCAGGACCTGG | 889 | EVKLQESGPGLVAPSQSLSVTCTVSGVSLPD | 890 |
| | CCTGGTGGCGCCCTCACAGAGCCTGTCCG | | YGVSWIRQPPRKGLEWLGVIWGSETTYYNS | |
| | TCACATGCACTGTCTCAGGGGTCTCATTAC | | ALKSRLTIIKDNSKSQVFLKMNSLQTDDTAIY | |
| | CCGACTATGGTGTAAGCTGGATTCGCCAGC | | YCAKHYYYGGSYAMDYWGQGTSVTVSS | |
| | CTCCACGAAAGGGTCTGGAGTGGCTGGGA | | | |
| | GTAATATGGGGTAGTGAAACCACATACTATA | | | |
| | ATTCAGCTCTCAAATCCAGACTGACCATCAT | | | |
| | CAAGGACAACTCCAAGAGCCAAGTTTTCTTA | | | |
| | AAAATGAACAGTCTGCAAACTGATGACACA | | | |
| | GCCATTTACTACTGTGCCAAACATTATTACT | | | |
| | ACGGTGGTAGCTATGCTATGGACTACTGGG | | | |
| | GTCAAGGAACCTCAGTCACCGTCTCCTCA | | | |
| Linker | GGATCC | 891 | GS | 892 |
| Q-Bend (CD34 | GAACTTCCTACTCAGGGGACTTTCTCAAAC | 893 | ELPTQGTFSNVSTNVS | 894 |
| Epitope) | GTTAGCACAAACGTAAGT | | | |
| CD8 Stalk | CCCGCCCCAAGACCCCCCACACCTGCGCC | 895 | PAPRPPTPAPTIASQPLSLRPEACRPAAGGA | 896 |
| | GACCATTGCTTCTCAACCCCTGAGTTTGAG | | VHTRGLDFACD | |
| | ACCCGAGGCCTGCCGGCCAGCTGCCGGCG | | | |
| | GGGCCGTGCATACAAGAGGACTCGATTTCG | | | |
| | CTTGCGAC | | | |
| CD8a tm | ATCTATATCTGGGCACCTCTCGCTGGCACC | 897 | IYIWAPLAGTCGVLLLSLVITLYCNHRNRRRV | 898 |
| | TGTGGAGTCCTTCTGCTCAGCCTGGTTATTA | | CKCPR | |
| | CTCTGTACTGTAATCACCGGAATCGCCGCC | | | |
| | GCGTTTGTAAGTGTCCCAGG | | | |
| Linker | GTCGAC | 899 | VD | 900 |
| CD3 zeta | AGAGTGAAGTTCAGCAGGAGCGCAGACGC | 901 | RVKFSRSADAPAYQQGQNQLYNELNLGRRE | 902 |
| | CCCCGCGTACCAGCAGGGCCAGAACCAGC | | EYDVLDKRRGRDPEMGGKPRRKNPQEGLY | |
| | TCTATAACGAGCTCAATCTAGGACGAAGAG | | NELQKDKMAEAYSEIGMKGERRRGKGHDGL | |
| | AGGAGTACGATGTTTTGGACAAGAGACGTG | | YQGLSTATKDTYDALHMQALPP | |
| | GCCGGGACCCTGAGATGGGGGGAAAGCCG | | | |
| | AGAAGGAAGAACCCTCAGGAAGGCCTGTAC | | | |
| | AATGAACTGCAGAAAGATAAGATGGCGGAG | | | |
| | GCCTACAGTGAGATTGGGATGAAAGGCGAG | | | |
| | CGCCGGAGGGGCAAGGGGCACGATGGCCT | | | |
| | TTACCAGGGTCTCAGTACAGCCACCAAGGA | | | |
| | CACCTACGACGCCCTTCACATGCAAGCTCT | | | |
| | TCCACCTCG | | | |

### Example 24: An Inducible Cell Death Switch Directed by Heterodimerizing Ligands

### Methods

### Transfection of Cells

[0779] HEK 293T cells (5×10⁵) were seeded on a 100-mm tissue culture dish in 10 mL DMEM4500, supplemented with glutamine, penicillin/streptomycin and 10% fetal calf serum. After 16-30 hours incubation, cells were transfected using Novagen's GeneJuice® protocol. Briefly, for each transfection, 0.5 mL OptiMEM was pipeted into a 1.5-mL microcentrifuge tube and 15 UL GeneJuice reagent added followed by 5 sec. vortexing. Samples were rested 5 minutes to settle the GeneJuice suspension. DNA (5 μg total) was added to each tube and mixed by pipetting up and down four times. Samples were allowed to rest for 5 minutes for GeneJuice-DNA complex formation and the suspension added dropwise to one dish of 293T cells. A typical transfection contains 1 μg SRα-SEAP (pBP0046) (3), 2 μg FRB-Caspase-9 (pBP0463) and 2 μg FKBPv12-Caspase-9 (pBP0044) (7).

Stimulation of Cells with Dimerizing Drugs

[0780] 24 hours following transfection (4.1), 293T cells were split to 96-well plates and incubated with dilutions of dimerizing drugs. Briefly, 100 μL media was added to each well of a 96-well flat-bottom plate. Drugs were diluted in tubes to a concentration 4× the top concentration in the gradient to be place on the plate. 100 μL of dimerizing ligand (rimiducid, rapamycin, isopropoxylrapamycin) was added to each of three wells on the far right of the plate (assays are thereby performed in triplicate). 100 μL from each drug-containing well was then transferred to the adjacent well and the cycle repeated 10 times to produce a serial two-fold step gradient. The last wells were untreated and serve as a control for basal reporter activity. Transfected 293 cells were then trypsinized, washed with complete media, suspended in media and 100 μL aliquoted to each well containing drug (or no drug). Cells were incubated 24 hours.

### Assay of Reporter Activity

[0781] The SRα promoter is a hybrid transcriptional element comprising the SV40 early region (which drives T antigen transcription) and parts (R and U5) of the Long Terminal Repeat (LTR) of Human T Cell Lymphotropic Virus (HTLV-1). This promoter drives high, constitutive levels of the Secreted Alkaline Phosphate (SeAP) reporter gene. Activation of caspase-9 by dimerization rapidly leads to cell death and the proportion of cells dying increases with increasing drug amounts. When cells die, transcription and translation of reporter stops but already secreted reporter proteins persists in the media. Loss of constitutive SeAP activity is thereby an effective proxy for drug-dependent activation of cell death.

[0782] 24 hours after drug stimulation, 96-well plates were wrapped to prevent evaporation and incubated at 65° C. for 2 hours to inactivate endogenous and serum phosphatases while the heat-stable SeAP reporter remains (1, 4, 12). 100 μL samples from each well were loaded into individual wells of a 96-well assay plate with black sides. Samples were incubated with 0.5 mM 4-methylumbelliferyl phosphate (4-MUP) in 0.5 M diethanolamine at pH 10.0 for 4 to 16 hours. Phosphatase activity was measured by fluorescence with excitation at 355 nm and emission at 460 nm. Data was transferred to a Microsoft Excel spreadsheet for tabulation and graphed with GraphPad Prism.

### Production of Isopropyloxyrapamycin

[0783] The method of Luengo et al. ((J. Org. Chem 59:6512, (1994)), (16, 17)) was employed. Briefly, 20 mg of rapamycin was dissolved in in 3 mL isopropanol and 22.1 mg of p-toluene sulfonic acid was added and incubated at room temperature with stirring for 4-12 hours. At completion, 5 mL ethyl acetate was added and products were extracted five times with saturated sodium bicarbonate and 3 times with brine (saturated sodium chloride). The organic phase was dried and redissolved in ethyl acetate:hexane (3:1). Stereoisomers and minor products were resolved by FLASH chromatography on a 10 to 15-mL silica gel column with 3:1 ethyl acetate: hexane under 3-4 KPa pressure and fractions dried. Fractions were assayed by spectrophotometry at 237 nM, 267 nM, 278 nM and 290 nM and tested for binding specificity in a FRB allele-specific transcriptional switch.

Direct Dimerization of FRB-Caspase with FKBP-Caspase with Rapamycin Directs Apoptosis.

[0784] Dimerization of FKBP-fused caspases can be dimerized by homodimerizer molecules, such as AP1510, AP20187 or AP1903. A similar pro-apoptotic switch can be directed via heterodimerization of a binary switch using rapamycin by coexpression of a FRB-Caspase-9 fusion protein along with FKBP-Caspase-9, leading to homodimerization of the caspase domains. In FIG. 37, a constitutively active SeAP reporter plasmid was cotransfected into 293T cells along with the caspase constructs. Transfected cells abundantly produced SeAP that was readily measured without drug and which served as the 100% normalization standard in the experiment. Incubation of the two fusion proteins with rimiducid produces a dose-dependent homodimerization of only FKBP12-Caspase9, leading to dimerization and activation of apoptosis, while FRB-Caspase9 remains excluded from the rimiducid-driven complex (left). In contrast, incubation with rapamycin associates FRB and FKBP directly and linked Caspase-9 moieties associate and activate. Cell death was measured indirectly by the loss of SeAP reporter production as cells die. This experiment demonstrated that heterodimerization with rapamycin produces dose-dependent cell death, revealing a novel safety switch with nanomolar drug sensitivity.

[0785] FIG. 37—Drug induced programmed cell death by homodimerization or heterodimerization of tagged caspase 9. 293T cells were transfected with SRα-SeAP (pBP0046), pSH1-FKBPv12-Caspase9 (pBP0044) and pSH1-FRB_{L}-Caspase9 (pBP0463). After 24-hr incubation, cells were split and incubated with increasing concentrations of rapamycin (blue), rimiducid (red) or ethanol (the solvent containing stock rapamycin). Loss of reporter activity is a proxy for the loss of cell viability. Reporter activity is expressed as a percentage of the average of 8 control wells containing no drug. Assays with drugs were performed in triplicate.

### Cell Death can be Directed by Rapamycin or Rapamycin Analogs.

[0786] Rapamycin is an effective heterodimerizing agent, but as a result of causing the docking of FKBP12 with the protein kinase mTOR, rapamycin is also a potent inhibitor of signal transduction, resulting in reduced protein translation and reduced cell growth. Derivatives of rapamycin at C3 or C7 ring positions have reduced affinity for mTOR but retain high affinity for mutants in “helix 4” of the FRB domain. Plasmid pBP0463 contains a mutation that substitutes leucine for the wild-type threonine at position 2098 in the FRB domain (using the mTOR numbering) and accommodates derivatives at C7. Incubation of 293T cells transfected with FRB_{L}-Caspase 9, FKBPv12-Caspase 9 and the constitutive SeAP reporter produced a dose-dependent high efficacy cell death switch with rapamycin or the rapamycin analog (rapalog) C7-isopropyloxlrapamycin (FIG. 38).

[0787] FIG. 38—Rapalog-induced cell death switch. 293T cells were transfected with SRα-SeAP (pBP0046), pSH1-FKBPv12-Caspase9 (pBP0044) and pSH1-FRB_{L}-Caspase9 (pBP0463). After 24-hr incubation, cells were split and incubated with increasing concentrations of rapamycin (blue), C7-isopropyloxlrapamcin (green) or ethanol (the solvent containing drug stocks). Loss of reporter activity is a proxy for loss of cell viability. Reporter activity is expressed as a percentage of the average of 8 wells containing no drug. Drug-containing assays were performed in triplicate.

### Rapamycin-Induced Cell Death Requires the Presence of FRB-Caspase-9.

[0788] To demonstrate that rapamycin-induced cell death results from dimerization of Caspase-9 molecules linked separately with FRB and FKBP12, two control experiments were performed

[0789] (FIGS. 39 and 40). iC9 (FKBPv12-Caspase-9) was cotransfected with a control vector expressing only an epitope tag (FIG. 39) or a vector containing FRB without caspase fusion, but instead with a short, irrelevant tag (FIG. 40). In each case, incubation with rimiducid effectively permitted homodimerization and induction of Caspase-9, but rapamycin incubation did not promote cell death. These findings support the conclusion that the mechanism of rapamycin/rapalog-mediated cell death is activation of dimerized C9 molecules rather than recruitment of mTOR to Caspase-9 or due to an indirect mechanism involving endogenous mTOR inhibition.

[0790] FIG. 39—FRB-Caspase-9 is required for a rapamycin-induced cell death switch. 293T cells were transfected with SRα-SeAP (pBP0046), pS-NLS-E and pSH1-FKBPv12-Caspase9 (pBP0044).

[0791] FIG. 40—Caspase-9 fusion with FRB is required for a rapamycin-induced cell death switch. 293T cells were transfected with SRα-SeAP (pBP0046), pSH1-FRB_{L}.VP16 (pBP0731) (4) and pSH1-FKBPv12-Caspase9 (pBP0044). After 24-hr incubation, cells were split and incubated with increasing concentrations of rapamycin (blue), C7-isopropyloxlrapamcin (red), rimiducid (green) or ethanol (the solvent containing drug stocks). Loss of reporter activity is a proxy for the loss of cell viability. Reporter activity is expressed as a percentage of the average of 8 wells containing no drug. Drug-containing wells were assayed in triplicate wells.

[0792] The following references are referred to in this Example and are hereby incorporated by reference herein in their entireties:
[0793] 1. Spencer D M, Wandless T J, Schreiber S L, and Crabtree G R. Controlling signal transduction with synthetic ligands. Science. 1993; 262 (5136): 1019-24.
[0794] 2. Acevedo V D, Gangula R D, Freeman K W, Li R, Zhang Y, Wang F, Ayala G E, Peterson L E, Ittmann M, and Spencer D M. Inducible FGFR-1 activation leads to irreversible prostate adenocarcinoma and an epithelial-to-mesenchymal transition. Cancer Cell. 2007; 12 (6): 559-71.
[0795] 3. Spencer D M, Belshaw P J, Chen L, Ho S N, Randazzo F, Crabtree G R, and Schreiber S L. Functional analysis of Fas signaling in vivo using synthetic inducers of dimerization. Curr Biol. 1996; 6 (7): 839-47.
[0796] 4. Bayle J H, Grimley J S, Stankunas K, Gestwicki J E, Wandless T J, and Crabtree G R. Rapamycin analogs with differential binding specificity permit orthogonal control of protein activity. Chem Biol. 2006; 13 (1): 99-107.
[0797] 5. Strasser A, Cory S, and Adams J M. Deciphering the rules of programmed cell death to improve therapy of cancer and other diseases. EMBO J. 2011; 30 (18): 3667-83.
[0798] 6. Fan L, Freeman K W, Khan T, Pham E, and Spencer D M. Improved artificial death switches based on caspases and FADD. Hum Gene Ther. 1999; 10 (14): 2273-85.
[0799] 7. Straathof K C, Pule M A, Yotnda P, Dotti G, Vanin E F, Brenner M K, Heslop H E, Spencer D M, and Rooney C M. An inducible caspase 9 safety switch for T-cell therapy. Blood. 2005; 105 (11): 4247-54.
[0800] 8. Sabatini D M, Erdjument-Bromage H, Lui M, Tempst P, and Snyder S H. RAFT1: a mammalian protein that binds to FKBP12 in a rapamycin-dependent fashion and is homologous to yeast TORs. Cell. 1994; 78 (1): 35-43.
[0801] 9. Brown E J, Albers M W, Shin T B, Ichikawa K, Keith C T, Lane W S, and Schreiber S L. A mammalian protein targeted by G1-arresting rapamycin-receptor complex. Nature. 1994; 369 (6483): 756-8.
[0802] 10. Chen J, Zheng X F, Brown E J, and Schreiber S L. Identification of an 11-kDa FKBP12-rapamycin-binding domain within the 289-kDa FKBP12-rapamycin-associated protein and characterization of a critical serine residue. Proc Natl Acad Sci USA. 1995; 92 (11): 4947-51.
[0803] 11. Choi J, Chen J, Schreiber S L, and Clardy J. Structure of the FKBP12-rapamycin complex interacting with the binding domain of human FRAP. Science. 1996; 273 (5272): 239-42.
[0804] 12. Ho S N, Biggar S R, Spencer D M, Schreiber S L, and Crabtree G R. Dimeric ligands define a role for transcriptional activation domains in reinitiation. Nature. 1996; 382 (6594): 822-6.
[0805] 13. Klemm J D, Beals C R, and Crabtree G R. Rapid targeting of nuclear proteins to the cytoplasm. Curr Biol. 1997; 7 (9): 638-44.
[0806] 14. Stankunas K, Bayle J H, Gestwicki J E, Lin Y M, Wandless T J, and Crabtree G R. Conditional protein alleles using knockin mice and a chemical inducer of dimerization. Mol Cell. 2003; 12 (6): 1615-24.
[0807] 15. Stankunas K, Bayle J H, Havranek J J, Wandless T J, Baker D, Crabtree G R, and Gestwicki J E. Rescue of Degradation-Prone Mutants of the FK506-Rapamycin Binding (FRB) Protein with Chemical Ligands. Chembiochem. 2007.
[0808] 16. Liberles S D, Diver S T, Austin D J, and Schreiber S L. Inducible gene expression and protein translocation using nontoxic ligands identified by a mammalian three-hybrid screen. Proc Natl Acad Sci USA. 1997; 94 (15): 7825-30.
[0809] 17. Luengo J I, Yamashita D S, Dunnington D, Beck A K, Rozamus L W, Yen H K, Bossard M J, Levy M A, Hand A, Newman-Tarr T, et al. Structure-activity studies of rapamycin analogs: evidence that the C-7 methoxy group is part of the effector domain and positioned at the FKBP12-FRAP interface. Chem Biol. 1995; 2 (7): 471-81.

| | | | | |
|---|---|---|---|---|
| | | SEQ | | SEQ |
| Fragment | Nucleotide | ID NO: | Peptide | ID NO: |

pBP0463--pSH1-FRB_{L}.dCaspase9.T2A (From FIG. 41)

| | | | | |
|---|---|---|---|---|
| Linker | ATGCTCGAG | 903 | MLE | 904 |
| FRB_{L} | TGGCATGAAGGGTTGGAAGAAGC | 905 | GVQVETISPGDGRTFPKRGQTCV | 906 |
| | TTCAAGGCTGTACTTCGGAGAGA | | VHYTGMLEDGKKFDSSRDRNKPF | |
| | GGAACGTGAAGGGCATGTTTGAG | | KFMLGKQEVIRGWEEGVAQMSVG | |
| | GTTCTTGAACCTCTGCACGCCAT | | QRAKLTISPDYAYGATGHPPKIPP | |
| | GATGGAACGGGGACCGCAGACA | | HATLVFDVELLKLE | |
| | CTGAAAGAAACCTCTTTTAATCAG | | | |
| | GCCTACGGCAGAGACCTGATGGA | | | |
| | GGCCCAAGAATGGTGTAGAAAGT | | | |
| | ATATGAAATCCGGTAACGTGAAAG | | | |
| | ACCTGCTCCAGGCCTGGGACCTT | | | |
| | TATTACCATGTGTTCAGGCGGATC | | | |
| | AGTAAG | | | |
| Linker | TCAGGCGGTGGCTCAGGTGTCGA | 907 | SGGGSGVD | 908 |
| | G | | | |
| Δ- | GTCGACGGATTTGGTGATGTCGG | 909 | DGFGDVGALESLRGNADLAYILSM | 910 |
| Caspase9 | TGCTCTTGAGAGTTTGAGGGGAA | | EPCGHCLIINNVNFCRESGLRTRT | |
| | ATGCAGATTTGGCTTACATCCTGA | | GSNIDCEKLRRRFSSLHFMVEVKG | |
| | GCATGGAGCCCTGTGGCCACTGC | | DLTAKKMVLALLELARQDHGALDC | |
| | CTCATTATCAACAATGTGAACTTC | | CVVVILSHGCQASHLQFPGAVYGT | |
| | TGCCGTGAGTCCGGGCTCCGCAC | | DGCPVSVEKIVNIFNGTSCPSLGG | |
| | CCGCACTGGCTCCAACATCGACT | | KPKLFFIQACGGEQKDHGFEVAST | |
| | GTGAGAAGTTGCGGCGTCGCTTC | | SPEDESPGSNPEPDATPFQEGLR | |
| | TCCTCGCTGCATTTCATGGTGGA | | TFDQLDAISSLPTPSDIFVSYSTFP | |
| | GGTGAAGGGCGACCTGACTGCCA | | GFVSWRDPKSGSWYVETLDDIFE | |
| | AGAAAATGGTGCTGGCTTTGCTG | | QWAHSEDLQSLLLRVANAVSVKGI | |
| | GAGCTGGCGCgGCAGGACCACG | | YKQMPGCFNFLRKKLFFKTSASRA | |
| | GTGCTCTGGACTGCTGCGTGGTG | | | |
| | GTCATTCTCTCTCACGGCTGTCAG | | | |
| | GCCAGCCACCTGCAGTTCCCAGG | | | |
| | GGCTGTCTACGGCACAGATGGAT | | | |
| | GCCCTGTGTCGGTCGAGAAGATT | | | |
| | GTGAACATCTTCAATGGGACCAG | | | |
| | CTGCCCCAGCCTGGGAGGGAAG | | | |
| | CCCAAGCTCTTTTTCATCCAGGCC | | | |
| | TGTGGTGGGGAGCAGAAAGACCA | | | |
| | TGGGTTTGAGGTGGCCTCCACTT | | | |
| | CCCCTGAAGACGAGTCCCCTGGC | | | |
| | AGTAACCCCGAGCCAGATGCCAC | | | |
| | CCCGTTCCAGGAAGGTTTGAGGA | | | |
| | CCTTCGACCAGCTGGACGCCATA | | | |
| | TCTAGTTTGCCCACACCCAGTGA | | | |
| | CATCTTTGTGTCCTACTCTACTTT | | | |
| | CCCAGGTTTTGTTTCCTGGAGGG | | | |
| | ACCCCAAGAGTGGCTCCTGGTAC | | | |
| | GTTGAGACCCTGGACGACATCTT | | | |
| | TGAGCAGTGGGCTCACTCTGAAG | | | |
| | ACCTGCAGTCCCTCCTGCTTAGG | | | |
| | GTCGCTAATGCTGTTTCGGTGAAA | | | |
| | GGGATTTATAAACAGATGCCTGGT | | | |
| | TGCTTTAATTTCCTCCGGAAAAAA | | | |
| | CTTTTCTTTAAAACATCAGCTAGC | | | |
| | AGAGCC | | | |
| T2A | GAGGGCAGGGGAAGTCTTCTAAC | 911 | EGRGSLLTCGDVEENPGP | 912 |
| | ATGCGGGGACGTGGAGGAAAATC | | | |
| | CCGGGCCCtga | | | |

pBP0044--pSH1-FKBP_{v36.}dCaspase9.T2A (from FIG. 42)

| | | | | |
|---|---|---|---|---|
| Linker | ATGCTCGAG | 913 | MLE | 914 |
| FKBP_{V36} | GGAGTGCAGGTGGAgACtATCTCC | 915 | GVQVETISPGDGRTFPKRGQTCV | 916 |
| | CCAGGAGACGGGCGCACCTTCCC | | VHYTGMLEDGKKVDSSRDRNKPF | |
| | CAAGCGCGGCCAGACCTGCGTG | | KFMLGKQEVIRGWEEGVAQMSVG | |
| | GTGCACTACACCGGGATGCTTGA | | QRAKLTISPDYAYGATGHPGIIPPH | |
| | AGATGGAAAGAAAGTTGATTCCTC | | ATLVFDVELLKL | |
| | CCGGGACAGAAACAAGCCCTTTA | | | |
| | AGTTTATGCTAGGCAAGCAGGAG | | | |
| | GTGATCCGAGGCTGGGAAGAAGG | | | |
| | GGTTGCCCAGATGAGTGTGGGTC | | | |
| | AGAGAGCCAAACTGACTATATCTC | | | |
| | CAGATTATGCCTATGGTGCCACT | | | |
| | GGGCACCCAGGCATCATCCCACC | | | |
| | ACATGCCACTCTCGTCTTCGATGT | | | |
| | GGAGCTTCTAAAACTGGAA | | | |
| Linker | TCAGGCGGTGGCTCAGGTGTCGA | 917 | SGGGSGVD | 918 |
| | G | | | |
| Δ- | GTCGACGGATTTGGTGATGTCGG | 919 | DGFGDVGALESLRGNADLAYILSM | 920 |
| Caspase9 | TGCTCTTGAGAGTTTGAGGGGAA | | EPCGHCLIINNVNFCRESGLRTRT | |
| | ATGCAGATTTGGCTTACATCCTGA | | GSNIDCEKLRRRFSSLHFMVEVKG | |
| | GCATGGAGCCCTGTGGCCACTGC | | DLTAKKMVLALLELARQDHGALDC | |
| | CTCATTATCAACAATGTGAACTTC | | CVVVILSHGCQASHLQFPGAVYGT | |
| | TGCCGTGAGTCCGGGCTCCGCAC | | DGCPVSVEKIVNIFNGTSCPSLGG | |
| | CCGCACTGGCTCCAACATCGACT | | KPKLFFIQACGGEQKDHGFEVAST | |
| | GTGAGAAGTTGCGGCGTCGCTTC | | SPEDESPGSNPEPDATPFQEGLR | |
| | TCCTCGCTGCATTTCATGGTGGA | | TFDQLDAISSLPTPSDIFVSYSTFP | |
| | GGTGAAGGGCGACCTGACTGCCA | | GFVSWRDPKSGSWYVETLDDIFE | |
| | AGAAAATGGTGCTGGCTTTGCTG | | QWAHSEDLQSLLLRVANAVSVKGI | |
| | GAGCTGGCGCgGCAGGACCACG | | YKQMPGCFNFLRKKLFFKTSASRA | |
| | GTGCTCTGGACTGCTGCGTGGTG | | | |
| | GTCATTCTCTCTCACGGCTGTCAG | | | |
| | GCCAGCCACCTGCAGTTCCCAGG | | | |
| | GGCTGTCTACGGCACAGATGGAT | | | |
| | GCCCTGTGTCGGTCGAGAAGATT | | | |
| | GTGAACATCTTCAATGGGACCAG | | | |
| | CTGCCCCAGCCTGGGAGGGAAG | | | |
| | CCCAAGCTCTTTTTCATCCAGGCC | | | |
| | TGTGGTGGGGAGCAGAAAGACCA | | | |
| | TGGGTTTGAGGTGGCCTCCACTT | | | |
| | CCCCTGAAGACGAGTCCCCTGGC | | | |
| | AGTAACCCCGAGCCAGATGCCAC | | | |
| | CCCGTTCCAGGAAGGTTTGAGGA | | | |
| | CCTTCGACCAGCTGGACGCCATA | | | |
| | TCTAGTTTGCCCACACCCAGTGA | | | |
| | CATCTTTGTGTCCTACTCTACTTT | | | |
| | CCCAGGTTTTGTTTCCTGGAGGG | | | |
| | ACCCCAAGAGTGGCTCCTGGTAC | | | |
| | GTTGAGACCCTGGACGACATCTT | | | |
| | TGAGCAGTGGGCTCACTCTGAAG | | | |
| | ACCTGCAGTCCCTCCTGCTTAGG | | | |
| | GTCGCTAATGCTGTTTCGGTGAAA | | | |
| | GGGATTTATAAACAGATGCCTGGT | | | |
| | TGCTTTAATTTCCTCCGGAAAAAA | | | |
| | CTTTTCTTTAAAACATCAGCTAGC | | | |
| | AGAGCC | | | |
| T2A | GAGGGCAGGGGAAGTCTTCTAAC | 921 | EGRGSLLTCGDVEENPGP | 922 |
| | ATGCGGGGACGTGGAGGAAAATC | | | |
| | CCGGGCCCtga | | | |

### Example 25: Dual Control of Modified Cells

[0810] Chemical Induction of protein Dimerization (CID) has been effectively applied to make cellular suicide or apoptosis inducible with the small molecule homodimerizing ligand, rimiducid (AP1903). This technology underlies the “safety switch” incorporated as a gene therapy adjunct in cell transplants (1, 2). Using this technology, normal cellular regulatory pathways that rely on protein-protein interaction as part of a signaling pathway can be adapted to ligand-dependent, conditional control if a small molecule dimerizing drug is used to control the protein-protein oligomerization event (3-5). Induced dimerization of a fusion protein comprising Caspase-9 and FKBP12 or an FKBP12 variant (i.e., “iCaspase9/iCasp9/iC9) using a homodimerizing ligand, such as rimiducid (AP1903), AP1510 or AP20187, can rapidly effect cell death. (Amara J F (97) PNAS 94:10618-23). Caspase-9 is an initiating caspase that acts as a “gate-keeper” of the apoptotic process (6). Pro-apoptotic molecules (e.g., cytochrome c) released from the mitochondria of apoptotic cells alter the conformation of Apaf-1, a caspase-9-binding scaffold, leading to its oligomerization and formation of the “apoptosome”. This alteration facilitates caspase-9 dimerization and cleavage of its latent form into an active molecule that, in turn, cleaves the “downstream” apoptosis effector, caspase-3, leading to irreversible cell death. Rimiducid binds directly with two FKBP12-V36 moieties and can direct the dimerization of fusion proteins that include FKBP12-V36 (1, 2). iC9 engagement with rimiducid circumvents the need for Apaf1 conversion to the active apoptosome. In this example, the fusion of caspase-9 to protein moieties that engage a heterodimerizing ligand was assayed for its ability to direct its activation and cell death with similar efficacy to rimiducid-mediated iC9 activation. MyD88 and CD40 were chosen as the basis of the iMC activation switch. MyD88 plays a central signaling role in the detection of pathogens or cell injury by antigen-presenting cells (APCs), like dendritic cells (DCs). Following exposure to pathogen- or necrotic cells-derived “danger” molecules”, a subclass of “pattern recognition receptors”, called Toll-Like Receptors (TLRs) are activated, leading to the aggregation and activation of adapter molecule, MyD88, via homologous TLR-IL1RA (TIR) domains on both proteins. MyD88, in turn, activates downstream signaling, via the rest of the protein. This leads to the upregulation of costimulatory proteins, like CD40, and other proteins, like MHC and proteases, needed for antigen processing and presentation. The fusion of signaling domains from MyD88 and CD40 with two Fv domains, provides iMC (also MCFvvMC.FvFv), which potently activated DCs following exposure to rimiducid (7). It was later found that iMC is a potent costimulatory protein for T cells, as well.

[0811] Rapamycin is a natural product macrolide that binds with high affinity (<1 nM) to FKBP12 and together initiates the high-affinity, inhibitory interaction with the FKBP-Rapamycin-Binding (FRB) domain of mTOR (8). FRB is small (89 amino acids) and can thereby be used as a protein “tag” or “handle” when appended to many proteins (9-11). Coexpression of a FRB-fused protein with a second FKBP12-fused protein renders their approximation rapamycin-inducible (12-16). This and the following examples provide experiments and results designed to test whether coexpression of FRB-bound Caspase-9 (iRC9) with FKBP-bound Caspase-9 (iC9) can also direct apoptosis and serve as the basis for a cell safety switch regulated by the orally available ligand, rapamycin, or derivatives of rapamycin (rapalogs) that do not inhibit mTOR at a low, therapeutic dose but instead bind with selected, Caspase-9-fused mutant FRB domains.

[0812] Also provided in these examples is another embodiment of the dual-switch technology, (FwtFRBC9/MCFvFv) where a homodimerizer, such as AP1903 (rimiducid), induces activation of a modified cell, and a heterodimerizer, such as rapamycin or a rapalog, activates a safety switch, causing apoptosis of the modified cell. In this embodiment, for example, a chimeric pro-apoptotic polypeptide, such as, for example, Caspase-9, comprising both an FKBP12 and an FRB, or FRB variant region (FwtFRBC9) is expressed in a cell along with an inducible chimeric MyD88/CD40 costimulating polypeptide, that comprises MyD88 and CD40 polypeptides and at least two copies of FKBP12v36 (MC.FvFv). Upon contacting the cell with a dimerizer that binds to the Fv regions, the MC. FvFv dimerizes or multimerizes, and activates the cell. The cell may, for example, be a T cell that expresses a chimeric antigen receptor directed against a target antigen (CARζ). As a safety switch, the cell may be contacted with a heterodimerizer, such as, for example, rapamycin, or a rapalog, that binds to the FRB region on the FwtFRB.C9 polypeptide, as well as the FKBP12 region on the FwtFRB.C9 polypeptide, causing direct dimerization of the Caspase-9 polypeptide, and inducing apoptosis. (FIG. 43 (2), FIG. 57). In another mechanism, the heterodimerizer binds to the FRB region on the FwtFRBC9 polypeptide, and the Fv region on the MC.FvFv polypeptide, causing scaffold-induced dimerization, due to the scaffold of two FKBP12v36 polypeptides on each MC.FvFv polypeptide (FIG. 43 (1)), and inducing apoptosis. Nucleic acid constructs that contain both MC.FvFv and FwtFRBC9 have been named FwtFRBC9/MC.FvFv, for purposes of these examples.

[0813] In another embodiment of the dual-switch technology, (FRBFwtMC/FvC9) a heterodimerizer, such as rapamycin or a rapalog, induces activation of a modified cell, and a homodimerizer, such as AP1903 activates a safety switch, causing apoptosis of the modified cell. In this embodiment, for example, a chimeric pro-apoptotic polypeptide, such as, for example, Caspase-9, comprising an Fᵥ region (iFvC9) was expressed in a cell along with an inducible chimeric MyD88/CD40 costimulating polypeptide, that comprises MyD88 and CD40 polypeptides and both an FKBP12 and an FRB or FRB variant region (FwtFRBMC) (MC.FvFv). Upon contacting the cell with rapamycin or a rapalog that heterodimerizes the FKBP12 and FRB regions, the FwtFRBMC dimerizes or multimerizes, and activates the cell. The cell may, for example, be a T cell that expresses a chimeric antigen receptor directed against a target antigen (CARζ). As a safety switch, the cell may be contacted with a homodimerizer, such as, for example, AP1903, that binds to the iFvC9 polypeptide, causing direct dimerization of the Caspase-9 polypeptide, and inducing apoptosis. (FIG. 57 (right)). Nucleic acid constructs that contain both iFvC9 and FwtFRBMC have been named FwtFRBMC/FvC9 for purposes of these examples.xxx

### Materials and Methods

### Production of Retroviruses and Transduction of Peripheral Blood Mononuclear Cells (PBMCs)

[0814] HEK 293T cells (1.5×10⁵) were seeded on a 100-mm tissue culture dish in 10 mL DMEM4500, supplemented with glutamine, penicillin/streptomycin and 10% fetal calf serum. After 16-30 hours incubation, cells were transfected using Novagen's GeneJuice® protocol. Briefly, for each transfection, 0.5 mL OptiMEM (LifeTechnologies) was pipeted into a 1.5-mL microcentrifuge tube and 30 μL GeneJuice reagent added followed by 5 sec. vortexing. Samples were rested 5 minutes to settle the GeneJuice suspension. DNA (15 μg total) was added to each tube and mixed by pipetting up and down four times. Samples were allowed to rest for 5 minutes for GeneJuice-DNA complex formation and the suspension added dropwise to one dish of 293T cells. A typical transfection included these plasmids to produce replication incompetent retrovirus: 3.75 μg plasmid containing gag-pol (pEQ-PAM3(−E)), 2.5 μg plasmid containing viral envelope (e.g., RD114), Retrovirus containing gene of interest=3=3.75 μg.

[0815] PBMCs were stimulated with anti-CD3 and anti-CD28 antibodies precoated to wells of tissue culture plates. 24 hours after plating, 100 U/ml IL-2 was added to the culture. On day 2 or three supernatant containing retrovirus from transfected 293T cells was filtered at 0.45 μm and centrifuged on non-TC treated plates precoated with Retronectin (10 μl per well in 1 ml of PBS per 1 cm² of surface). Plates were centrifuged at 2000 g for 2 hours at room temperature. CD3/CD28 blasts were resuspended at 2.5×10⁵ cells/ml in complete media, supplemented with 100 U/ml IL-2 and centrifuged on the plate at 1000×g for 10 minutes at room temperature. After 3-4 days incubation cells were counted and transduction efficiency measured by flow cytometry using the appropriate marker antibodies (typically CD34 or CD19). Cells were maintained in complete media supplemented with 100 U/ml IL-2, refed cells every 2-3 days with fresh media and IL-2 and split as needed to expand the cells.

### T Cell Caspase Assay in Cultured Cells

[0816] After transduction with the appropriate retrovirus, 50,000 T were seeded per well of 96-well plates in the presence or absence of suicide drugs (rimiducid or rapamycin) in CTL medium without IL-2. To enable detection of apoptosis using the IncuCyte instrument, 2 μM of IncuCyte™ Kinetic Caspase-3/7 Apoptosis reagent (Essen Bioscience, 4440) were add to each well to reach a total volume of 200 μl. The plates were centrifuged for 5 min at 400×g and placed inside the IncuCyte (Dual Color Model 4459) to monitor green fluorescence every 2-3 hours for a total of 48 hours at 10× objective. Image analysis was performed using the “Tcells_caspreagent_phase_green_10×_MLD” processing definition. The “Total Green Object Integrated Intensity” metric is used to quantify caspase activation. Each condition was performed in duplicates and each well was imaged at 4 different locations.

### T Cell Anti-Tumor Assay

[0817] The HPAC PSCA⁺ tumor cells were stably labeled with nuclear-localized RFP protein using the NucLight™ Red Lentivirus Reagent (Essen Bioscience, 4625). To set up the coculture, 4000 HPAC-RFP cells were seeded per well of 96-well plates in 100 μl of CTL medium without IL-2 for at least 4 hours to allow tumor cells to adhere. After transduction with the appropriate retrovirus and allowed to rest for at least 7 days in culture, T were seeded according to various E:T ratios to the HPAC-RFP-containing 96-well plates. Rimiducid was also added to the culture to reach 300 μl total volume per well. Each plate was set up in duplicates, one plate to monitor with the IncuCyte cell imaging system and one plate for supernatant collection for ELISA assay on day 2. The plates were centrifuged for 5 min at 400×g and placed inside the IncuCyte (Essen Bioscience, Dual Color Model 4459) to monitor red fluorescence (and green fluorescence if T cells were labeled with GFP-Ffluc) every 2-3 hours for a total of 7 days at 10× objective. Image analysis was performed using the “HPAC-RFP_TcellsGFP_10×_MLD” processing definition. On day 7, HPAC-RFP cells were analyzed using the “Red Object Count (1/well)” metric. Also on day 7, 0 or 10 nM of suicide drug were added to each well of the coculture and placed back in the IncuCyte to monitor T cell elimination. On day 8, Tcell-GFP cells were analyzed using the “Total Green Object Integrated Intensity” metric. Each condition was performed at least in duplicates and each well was imaged at 4 different locations.

[0818] To measure Raji cell anti-tumor activity populations of cells were determined by flow cytometry rather than incucyte as the cells do not adhere to a plate. Raji cells (ATCC) labeled by stable expression of Green Fluorescent Protein (Raji-GFP) are a Burkitt's lymphoma cell line that express CD19 on the cell surface and are a target for an anti-CD19 CAR. 50000 Raji-GFP cells were seeded on a 24 well plate with 10000 CAR-T cells, a 1:5 E:T ratio. Media supernatant was taken at 48 hours for determination of cytokine release by activated CAR-T cells. The degree of tumor killing was determined at 7 days and 14 days by flow cytometry (Galeos, Beckman-Coulter) by the proportion of GFP labeled tumor cells and CD3 labeled T cells.

### IVIS Imaging

[0819] NSG mice with labeled T cells anesthetized with isofluorane and injected with 100 μl D-luciferin (15 mg/ml stock solution in PBS) by an intraperitoneal (i.p.) route in the lower abdomen. After 10 minutes the animals were transferred from the anesthesia chamber to the IVIS platform. Images were acquired from the dorsal and ventral sides with an IVIS imager (Perkin-Elmer), and BLI quantitated and documented with Living Image software (IVIS Imaging Systems).

### Western Blot

[0820] After transduction with the appropriate retrovirus, 6,000,000 T cells were seeded per well of 6-well plates in 3 ml CTL medium. Twenty-four hours later, cells were collected, washed in cold PBS, and lysed in RIPA Lysis and Extraction Buffer (Thermo, 89901) containing 1× Halt Protease Inhibitor Cocktail (Thermo, 87786) on ice for 30 min. in the plated. The lysates were centrifuged at 16,000×g for 20 min at 4° C. and the supernatants were transferred to new Eppendorf tubes. Protein assay was performed using the Pierce BCA Protein Assay Kit (Thermo, 23227) per manufacturer's recommendation. To prepare samples for SDS-PAGE, 50 μg of lysates were mixed with 4× Laemmli Sample Buffer (Bio Rad, 1610747) and heat at 95° C. for 10 min. Meanwhile, 10% SDS gels were prepared using Bio Rad casting apparatus and 30% Acrylamide/bis Solution (Bio Rad, 160158). The samples were loaded along with Precision Plus Protein Dual Color Standards (Bio Rad, 1610374) and ran in 1× Tris/glycine Running Buffer (Bio Rad, 1610771) at 140 V for 90 min. After protein separation, the gels were transferred onto PVDF membranes using the program 0 (7 min total) in the iBlot 2 device (Thermo, IB21001). The membranes were probed with primary and secondary antibodies using the iBind Flex Western Device (Thermo, SLF2000) according to manufacturer's recommendation. Anti-MyD88 antibody (Sigma, SAB1406154) was used at 1:200 dilution and the secondary HRP-conjugated goat anti-mouse IgG antibody (Thermo, A16072) was used at 1:500 dilution. The caspase-9 antibody (Thermo, PA1-12506) was used at 1:200 dilution and the secondary HRP-conjugated goat anti-rabbit IgG antibody (Thermo, A16104) was used at 1:500 dilution. The β-actin antibody (Thermo, PA1-16889) was used at 1:1000 dilution and the secondary HRP-conjugated goat anti-rabbit IgG antibody (Thermo, A16104) was used at 1:1000 dilution. The membranes were developed using the SuperSignal West Femto Maximum Sensitivity Substrate Kit (Thermo, 34096) and imaged using the GelLogic 6000 Pro camera and the CareStream MI software (v.5.3.1.16369).

### Transfection of Cells for Reporter Assay

[0821] HEK 293T cells (1.5×10⁵) were seeded on a 100-mm tissue culture dish in 10 mL DMEM4500, supplemented with glutamine, penicillin/streptomycin and 10% fetal calf serum. After 16-30 hours incubation, cells were transfected using Novagen's GeneJuice® protocol. Briefly, for each transfection, 0.5 mL OptiMEM was pipeted into a 1.5-mL microcentrifuge tube and 15 μL GeneJuice reagent added followed by 5 sec. vortexing. Samples were rested 5 minutes to settle the GeneJuice suspension. DNA (5 μg total) was added to each tube and mixed by pipetting up and down four times. Samples were allowed to rest for 5 minutes for GeneJuice-DNA complex formation and the suspension added dropwise to one dish of 293T cells. A typical transfection contains 1 μg NFkB-SEAP (5), 4 μg iMC+CARζ (pBP0774) or 4 μg MC-Rap-CAR (pBP1440) (1).

Stimulation of Cells with Dimerizing Drugs

[0822] 24 hours following transfection (4.1), 293T cells were split to 96-well plates and incubated with dilutions of dimerizing drugs. Briefly, 100 μL media was added to each well of a 96-well flat-bottom plate. Drugs were diluted in tubes to a concentration 4× the top concentration in the gradient to be place on the plate. 100 μL of dimerizing ligand (rimiducid, rapamycin, isopropoxylrapamycin) was added to each of three wells on the far right of the plate (assays are thereby performed in triplicate). 100 μL from each drug-containing well was then transferred to the adjacent well and the cycle repeated 10 times to produce a serial two-fold step gradient. The last wells were untreated and serve as a control for basal reporter activity. Transfected 293 cells were then trypsinized, washed with complete media, suspended in media and 100 μL aliquoted to each well containing drug (or no drug). Cells were incubated 24 hours.

### Assay of Reporter Activity

[0823] The SRα promoter is a hybrid transcriptional element comprising the SV40 early region (which drives T antigen transcription) and parts (R and U5) of the Long Terminal Repeat (LTR) of Human T Cell Lymphotropic Virus (HTLV-1). This promoter drives high, constitutive levels of the Secreted Alkaline Phosphate (SeAP) reporter gene. Activation of caspase-9 by dimerization rapidly leads to cell death and the proportion of cells dying increases with increasing drug amounts. When cells die, transcription and translation of reporter stops but already secreted reporter proteins persists in the media. Loss of constitutive SeAP activity is thereby an effective proxy for drug-dependent activation of cell death.

[0824] 24 hours after drug stimulation, 96-well plates were wrapped to prevent evaporation and incubated at 65RC for 2 hours to inactivate endogenous and serum phosphatases while the heat-stable SeAP reporter remains (3, 12, 14). 100 μL samples from each well were loaded into individual wells of a 96-well assay plate with black sides. Samples were incubated with 0.5 mM 4-methylumbelliferyl phosphate (4-MUP) in 0.5 M diethanolamine at pH 10.0 for 4 to 16 hours. Phosphatase activity was measured by fluorescence with excitation at 355 nm and emission at 460 nm. Data was transferred to a Microsoft Excel spreadsheet for tabulation and graphed with GraphPad Prism.

### Production of Isopropyloxyrapamycin

[0825] The method of Luengo et al. ((J. Org. Chem 59:6512, (1994)), (17, 18)) was employed. Briefly, 20 mg of rapamycin was dissolved in in 3 mL isopropanol and 22.1 mg of p-toluene sulfonic acid was added and incubated at room temperature with stirring for 4-12 hours. At completion, 5 mL ethyl acetate was added and products were extracted five times with saturated sodium bicarbonate and 3 times with brine (saturated sodium chloride). The organic phase was dried and redissolved in ethyl acetate:hexane (3:1). Stereoisomers and minor products were resolved by FLASH chromatography on a 10 to 15-mL silica gel column with 3:1 ethyl acetate: hexane under 3-4 KPa pressure and fractions dried. Fractions were assayed by spectrophotometry at 237 nM, 267 nM, 278 nM and 290 nM and tested for binding specificity in a FRB allele-specific transcriptional switch.

### Expression of Components of the Activation Switch Technology

[0826] Retroviral constructs were created to express fusion proteins between FKBP12 with and without FRB and the inducible target protein. The constructs co-express Chimeric Antigen Receptors (CAR) as part of a gene therapy strategy to direct tumor specific immunity. Inducible (MC.FvFv) or constitutive (MC) costimulatory molecules were also present with the Caspase-9 safety switch. Each component was separated with a 2A cotranslational cleavage site derived from picornaviruses. To better understand how these molecules will function together in target T cells, it was important to determine steady state protein levels in T cells. To determine relative protein expression levels of all components of the “iMC+CARζ−T” (pBP0608; MC.FvFv+CARζ), “i9+CARζ+MC” (pBP0844; iFvCasp9+CARζ+constitutively active “MC”), and (pBP1300; FwtFRBC9/MC.FvFv+CARζ+iMC) vectors, Western blot analysis was performed on transduced T cells from four different donors using antibodies specific for MyD88, caspase-9 and α-actin (FIG. 44A). The results revealed that iMC+CARζ−T T cells express the MC.FvFv component at similar levels to i9+CARζ+MC T cells expressing MC (without fused FKBP12). However, the level of MC. FvFv expression in FwtFRBC9/MC. FvFv T cells was significantly lower than in the other two CAR modified T cells. Similarly, the iFvC9 component in the i9+CARζ+MC construct was expressed at much higher levels compared to the iFwtFRBC9 component (FKBP.FRB.ΔC9) in the FwtFRBC9/MC.FvFv construct, suggesting that the larger multi-cistronic insert was limiting protein expression or that high basal signaling activity from MC was eliminating cells expressing high levels of these chimeric proteins. To distinguish between these possibilities, the stability of CAR expression and basal toxicity in T cells over prolonged culture in vitro was assessed. CAR expression was analyzed by flow cytometry using antibody, QBend-10 (Biolegend), specific for an epitope derived from human CD34 incorporated into the extracellular portion of a 1^{st} generation CAR-ζ, and T cell viability was assessed using a Nexelon Cellometer with the cells stained with acridine orange and propidium iodide cells. Expression analysis by flow cytometry (Galleos, Beckman) demonstrated that iMC+CARζ−T cells express much higher CAR levels compared to i9+CARζ+MC and T cells (FIG. 44B). However, there was relatively no difference in the viability of cells grown in culture between the cells that had been modified with all three CAR T cell types (FIG. 44C). Thus, the difference in chimeric protein expression may have been based on the limiting packaging ability of the viral vector used.

Induction of Apoptosis with FwtFRBC9/MC.FvFv Constructs

[0827] To determine whether the FwtFRBC9/MC.FvFv construct was functional despite somewhat lower protein expression per cell, the functionality of the on and off switches incorporated into the FwtFRBC9/MC.FvFv construct design was examined in the absence of target tumor cells. The off switch (iFwtFRBC9), which was activated by rapamycin-induced dimerization of FKBP.FRB.ΔC9, was tested by subjecting T cells from 4 different donors, which were transduced with the iMC+CARζ−T, i9+CARζ+MC, and FwtFRBC9/MC.FvFv vectors, to a caspase-based killing assay using the “Caspase 3/7 Green” reagent (FIG. 45A). In this assay a peptide sensitive to Caspase 3 or 7 was linked with a latent fluorescent DNA intercalating dye. Activation of caspase 3/7 during apoptosis releases the dye permitting DNA binding and green cell fluorescence. A 96-well microplate containing cells was placed inside an IncuCyte machine to monitor activated caspase activity (cleaved caspase 3/7 reagent=green fluorescence) for 48 hours. The IncuCyte is an automated microscope that can observe, quantitate and document live cells cultured on plates with or without fluorescent labels over extended time periods. In the absence of drug, FwtFRBC9/MC.FvFv T cells displayed the highest level of basal toxicity followed by iMC+CARζ−T and i9+CARζ+MC-T cells, respectively. Rimiducid induced activation of iC9 (in i9+CARζ+MC) at a similar efficiency as rapamycin-inducing iFwtFRBC9 at all ligand concentrations (0.8, 4, 20 nM). However, the kinetics of iC9 activation appears to be slightly faster than that of iFwtFRBC9 activation. After 48 hours of suicide drug treatment, cells were analyzed by flow cytometry for the following markers: CD34 (engineered CAR T cell), propidium iodide (PI), Annexin V, and cleaved caspase 3/7 (green fluorescence) (FIG. 45B). A much higher percentage of dead (PI⁺/AnnV⁺) cells was observed in (FwtFRBC9/MC.FvFv) modified T cells (60%) than in i9+CARζ+MC-T cells (20%) 48 hours post-drug treatment, consistent with the high caspase activation level independently observed at later time points in (FwtFRBC9/MC.FvFv) modified T cells using an IncuCyte-based caspase assay. To examine the on-switch, which was activated by rimiducid-induced dimerization of MC.FKBPᵥ. FKBPᵥ (MCFvFv), iMC+CARζ−T and (FwtFRBC9/MC.FvFv) T cells were treated with various rimiducid concentrations, and IL-2 and IL-6 cytokine release was analyzed by ELISA (FIG. 45C). While iMC+CARζ−T cells showed inducible IL-2 and IL-6 production with increasing rimiducid concentration, cytokine production by (FwtFRBC9/MC.FvFv) T cells was relatively weaker. Basal, ligand-independent IL-6 production by i9+CARζ+MC (with MC) was present at a similar level to that of rimiducid-stimulated iMC+CARζ T cells. i9+CARζ+MC

[0828] High basal caspase activity could present a manufacturing challenge during viral or T cell production. Therefore, the ability of caspase-9 inhibitor, Q-LEHD-OPh (SEQ ID NO: 2364), to counteract basal caspase activity was assayed. Activated iC9 and iRC9 (FwtFRBC9) can be efficiently inhibited with Q-LEHD-OPh (SEQ ID NO: 2364), which did not appear to be toxic to the T cells at levels as high as 100 μM (FIG. 46). Furthermore, as low as 4 UM Q-LEHD-OPh (SEQ ID NO: 2364) was able to efficiently inhibit caspase-9 activation by iC9 and iRC9 (FwtFRBC9) when they were incubated with 20 nM of the respective activating ligands (FIG. 46C).

[0829] Another approach to attenuate high basal caspase activity is to utilize the FRB-T2098L (“FRB_{L}”) mutant that destabilizes protein expression in the iRC9 (FwtFRBC9) construct (15, 16). Additionally, a caspase-9 mutant (N405Q, ΔCasp9_{Q}) also reduces basal caspase activity in iC9. When investigated using the IncuCyte and caspase 3/7 green reagent, both FRB_{L} and Δcasp9_{Q} mutant iRC9 (FwtFRBC9) exhibited lower basal caspase activity compared to wild-type iRC9 (FwtFRBC9) (FIG. 47A). However, changing FRB from the wild-type (Threonine 2098) to the FRB_{L} mutant (Leucine 2098) reduced the maximum killing efficiency by iRC9 (FwtFRBC9) by approximately 50%. Similarly, changing Δcaspase-9 from wt to the N405Q mutant diminished iRC9 (FwtFRBC9) activity to even lower levels than the FRB_{L} mutation.

### Efficiency of Apoptosis Induction by Dimerizer Mediated Binding or Indirect Recruitment to a Scaffold

[0830] In this example, an inducible Caspase-9 polypeptide, comprising an FRB region (iFRBC9) was tested in modified cells that also expressed MC.FvFv. Here, in iRC9, rapamycin-induced dimerization of FRB.ΔC9 relies solely on the FKBP-based scaffold provided by the tandem FKBP12 proteins in MC.FKBPᵥ.FKBPᵥ (iMC) co-expressed within the same construct (see FIG. 48A for schematic). In this strategy, recruitment of multiple iFRBC9 molecules to the scaffold of FKBPs (e.g., scaffold of FKBP12v36s) facilitates their indirect spontaneous association and activation. To directly compare the extent of caspase activation between iC9 (pBP0844), IRC9 (pBP1116), and iRC9 (pBP1300), activated T cells were transduced with retrovirus encoding iMC+CARζ−T, i9+CARζ+MC, iFRBC9 and MC.FvFv, or (FwtFRBC9/MC.FvFv) and treated with no drug, 20 nM rapamycin or 20 nM rimiducid and cultured in the presence of caspase 3/7 green reagent (FIG. 48B-D). Although there was generally low basal caspase activity in all of the constructs, cells transduced with (FwtFRBC9/MC.FvFv) exhibited the highest basal caspase activity relative to the other CAR T cells (FIG. 48B). When induced with 20 nM rapamycin, (iFRBC9 and MC.FvFv) demonstrated modest caspase activation, while there was robust induction of caspase activity in T cells (FwtFRBC9/MC.FvFv). (FIG. 48C). This induction of apoptosis was similar in T cells expressing i9+CARζ+MC treated with 20 nM rimiducid (FIG. 48D). In this assay, 20 nM rimiducid was unable to induce dimerization of FKBP.FRB.Δcasp9 (IRC9). This is because of the 1000-fold reduction in affinity of rimiducid for wild-type FKBP present in iRC9 (iFwtFRBC9) relative to FKBPV₃₆.

### Whole Animal Model Assays

[0831] To demonstrate the functionality of iRC9 (FwtFRBC9) in vivo, NOD-Scid-IL-2Receptor^{-/-} mice (NSG, Jackson Labs) were injected i.v. with 1×10⁷ iMC+CARζ−T, i9+CARζ+MC, iFRBC9 and MC. FvFv or (FwtFRBC9/MC.FvFv) T cells co-transduced with GFP-FFluc per mouse. Bioluminescence imaging (BLI) of CAR T cells was assessed 18 hours (−18 h) prior to drug treatment, immediately before drug treatment (0 h) and 4.5 h, 18 h, 27 h, and 45 h post-drug treatment (FIGS. 49A & B). A subset of mice that received i9+CARζ+MC T cell injections were treated i.p. with 5 mg/kg rimiducid, while a subset of mice that received iMC+CARζ−T, (iFRBC9 and MC.FvFv) and −2.0 T cells were treated i.p. with 10 mg/kg rapamycin. All other mice received vehicle only i.p. At 45 h post-drug treatment, mice were euthanized, and blood and spleen were collected for flow cytometry analysis with antibodies to human (h) CD3 or CD34, and murine (m) CD45. Similar to iC9,iRC9 (iFwtFRBC9) quickly and efficiently eliminated FwtFRBC9/MC.FvFv T cells as assessed by BLI and analysis of blood and spleen tissues (FIGS. 49C & D). Induction of (iFRBC9 and MC.FvFv) T cell apoptosis was modest with delayed kinetics compared to i9+CARζ+MC and FwtFRBC9/MC.FvFv, consistent with in vitro cell death data presented in FIG. 48.

### FwtFRBC9/MC.FvFv Contains a Dual Costimulatory on Switch and Apoptotic Off Switch

[0832] To examine the functionality of both on- and off-switches in the FwtFRBC9/MC.FvFv construct in the presence of target tumor cells, T cells were labeled with GFP-FFluc (expressing a Green Fluorescent Protein fused with firefly luciferase as a cell marker in vivo) and co-transduced with PSCA-iMC+CARζ−T (pBP0189), i9+CARζ+MC (pBP0873), or FwtFRBC9/MC.FvFv (pBP1308)-encoding vectors (FIG. 50). Ten days post-transduction, T cells were seeded into 96-well plates at 1:2 and 1:5 effector to tumor target (E:T) ratios with HPAC pancreatic carcinoma cells constitutively labeled with RFP in the presence of 0, 2, or 10 nM rimiducid and placed in the IncuCyte machine to monitor the kinetics of HPAC-RFP and T cell-GFP growth. Two days post-seeding, culture supernatant was analyzed for IL-2, IL-6, and IFN-γ production by ELISA. Overall, iMC+CARζ−T cells produced approximately 3-fold higher levels of IL-2, IL-6, and IFN-γ compared to FwtFRBC9/MC.FvFv T cells at all rimiducid concentrations and both E:T ratios (FIGS. 50A & B). Additionally, the basal activity of the MC co-stimulatory component in the i9+CARζ+MC construct induced IL-6 and IFN-γ cytokine production at similar levels to that measured in rimiducid-stimulated iMC+CARζ−T cells. As seen in FIGS. 50C & D, less than 5% and 10% HPAC-RFP cells remained at 1:2 and 1:5 ratios, respectively. While (FwtFRBC9/MC.FvFv) T cells demonstrated rimiducid-dependent tumor cell killing at both ratios, iMC+CARζ−T cells appear to be rimiducid-independent at these ratios and of similar target killing efficiency as i9+CARζ+MC T cells. When analyzed for T cell expansion, FwtFRBC9/MC.FvFv.0 T cells proliferated and expanded with increasing rimiducid concentration, while iMC+CARζ−T cells were not able to expand to the same extent following 10 nM rimiducid stimulation. Administration of 10 nM rapamycin on day 7 of co-culture resulted in the elimination of more than 60% of (FwtFRBC9/MC.FvFv) T cells within 24 hours while 10 nM rimiducid caused reduction of approximately 50% of i9+CARζ+MC T cells, suggesting that the safety switch is also functional in FwtFRBC9/MC.FvFv.

### Caspase-9 Activation in FwtFRBC9/MC.FvFv

[0833] Activation of iRC9 (iFwtFRBC9) within the FwtFRBC9/MC.FvFv-modified T cells could be mediated by both FKBP.FRB.ΔC9 homo-dimerization and scaffold-mediated recruitment driven by recruitment of FRB in FKBP.FRB.C9 to FKBP in MC.FKBPᵥ.FKBPᵥ. To disrupt the ability of iRC9 (iFwtFRBC9) from being activated by scaffold-mediated recruitment, FwtFRBC9/MC.FvFv-related family vectors were generated containing MC.FKBPᵥ.FKBPᵥ (pBP1308, “iMC”), MC.FKBPᵥ (pBP1319, 1 FKBPᵥ), MC (pBP1320, no FKBPs), and MC.FKBPᵥ.FKBP (pBP1321, 1 FKBPᵥ and 1 non-AP1903-binding wild-type FKBP) (see FIG. 51A for schematic of the constructs). PSCA-19+CARζ+MC vector (pBP0873) served as a positive control for the off-switch and the CD19-iMC+CARζ−T vectors (pBP0608 with MC.FKBPᵥ.FKBPᵥ & pBP1439 with MC. FKBPᵥ) served as positive controls for the on-switch. Protein expression of the CAR-T cells using an anti-MyD88 antibody was determined. Removing 1 copy of FKBPᵥ from iMC resulted in increased MC fusion-protein expression in the FwtFRBC9/MC.FvFv platform (compare pBP1308 versus pBP1319) and the iMC+CARζ−T platform (compare pBP0608 versus pBP1439) (FIG. 51B). However, MC expression was reduced in the construct that contains MC.FKBPᵥ.FKBP (compare pBP1319 versus pBP1321), suggesting that the additional FKBP domain destabilized the MC-fusion protein. Most interestingly, the expression pattern of the i9+CARζ+MC platform constructs (i.e., pBP0873 containing iC9 and pBP1320 containing iRC9 (iFwtFRBC9)) reveal additional slow migrating bands when probed with anti-MyD88 antibody. In addition to the predicted 27 kDa MC fusion protein band, there are 3 additional bands detected at 90, 80 and 50 kDa. Based on the high basal MC signaling in i9+CARζ+MC vectors, this data may support the hypothesis that there is incomplete protein separation at the 2^{nd} “2A” site, resulting in the following candidate protein products: αPSCA.Q.CD8stm.ζ.2A-MC and CD8stm.ζ.2A-MC with the latter losing the scFv domain. In terms of caspase-9-fusion protein expression, there was no marked difference in chimeric caspase protein levels between the different variations of MC-fusion proteins (compare pBP1308, pBP1319, pBP1320, and pBP1321).

[0834] To test the off-switch, T cells transduced with the above vectors were subjected to a caspase activation assay with treatment of 0, 0.8, 4, 20 nM rapamycin. T cells transduced with the i9+CARζ+MC vector (pBP0873) were treated with rimiducid. Caspase activation 24 hours post-rapamycin (or rimiducid) exposure was determined and depicted by line graphs (FIG. 51C). Removing 1 copy of FKBPv from iMC actually resulted in improved caspase activation in the FwtFRBC9/MC.FvFv platform (iFwtFRBC9) (compare pBP1308 versus pBP1319). When both copies of FKBPᵥ were removed, caspase activity resembled that of iC9 in terms of kinetics, but at much higher amplitude (compare pBP0873 versus pBP1320). In the construct that contains MC.FKBPᵥ.FKBP, caspase activity reverted to a level comparable to that in the construct encoding original “iMC” MC.FKBPᵥ.FKBPᵥ (compare pBP1308 versus pBP1321).

Topology of FRB and FKBP in iRC9 (iFwtFRBC9)

[0835] Since the order and spacing of signaling elements and binding domains might possibly affect outcomes, the order of ligand-binding domains with the iFwtFRBC9 molecules was tested. The iRC9 (iFwtFRBC9) discussed above contained an amino terminal FKBP followed by a FRB domain, as in FKBP.FRB.ΔC9 (pBP1308 and pBP1311). To investigate the efficacy of the opposite configuration, FRB.FKBP.ΔC9/(pBP1310) was constructed (FIG. 51A). A caspase activation assay revealed that FRB.FKBP.ΔC9 was slightly more sensitive than FKBP.FRB.ΔC9 in terms of rapamycin-initiated apoptosis (FIG. 51D). This modest difference is consistent with the higher FRB.FKBP.ΔC9 protein levels compared to the FKBP.FRB.ΔC9 (FIG. 51B). Furthermore, since these two plasmids do not contain the dilutive iMC-associated scaffold, these data also provide evidence that iRC9 does not require scaffold to potently activate caspase signaling. In terms of the on-switch, all FwtFRBC9/MC.FvFv constructs (pBP1308, pBP1319, and pBP1321) exhibit low IL-2 and IL-6 cytokine production in the absence of tumor even when stimulated with rimiducid, while the rimiducid-inducible iMC+CARζ−T constructs (pBP0608 and pBP1439) demonstrate ligand-dependent activation, as expected (data not shown). Moreover, both of the i9+CARζ+MC constructs, containing MC (pBP0873 and pBP1320), induce high basal IL-6 production.

[0836] Since iRC9 contains the wild-type FKBP domain, the concentration of rimiducid capable of triggering dimerization and iRC9 activation was assayed to gauge the therapeutic window of safety for using rimiducid as a T cell stimulatory drug. In this assay, 293 cells were transiently transfected with vectors expressing iC9 and the two similar iRC9 variants (FRB.FKBP.ΔC9 and FKBP.FRB.ΔC9) (FIG. 52) and treated with half-log dilution of either rapamycin or rimiducid. Cells were subjected to either the caspase activation assay in the presence of caspase 3/7 green reagent and monitored by IncuCyte (FIG. 52A) or the secreted alkaline phosphatase (SEAP) assay using the constitutive SRα reporter (FIG. 52B). For FIG. 52B left graph, the lines of the graph, as indicated at the 10³ point of the x-axis are, from top to bottom, negative control, FKBP.FRB.C9, FRB.FKBP.C9, iC9. For FIG. 52B right graph, the lines of the graphat the 10³ point of the x-axis are, from top to bottom negative control, iC9, FKBP.FRB.C9, and FRB.FKBP.C9.

[0837] Functionally, iRC9 and iC9 appeared to induce caspase cleavage with similar kinetics and threshold when activated by their respective suicide drugs. iRC9 was highly active even in the presence of as little as 100 pM rapamycin, with some efficacy at even lower drug levels albeit with reduced kinetics. When comparing FRB.FKBP.ΔC9 versus FKBP.FRB.ΔC9, FRB.FKBP.ΔC9 was active at lower rapamycin concentration than FKBP.FRB.ΔC9, consistent with data obtained in FIG. 51D. Furthermore, iRC9 was insensitive to rimiducid below 100 nM, which provides a large window of safety to use rimiducid to induce T cell activation (generally at 1 to 10 nM). This experiment also demonstrates that (iFwtFRBC9) is a potent activator of apoptosis that is independent of scaffolding-induced dimerization provided by MC.FvFv.

### MC-Rap: An Inducible Costimulatory Polypeptide Directed by Rapamycin Analogs

[0838] To demonstrate the versatility of utilizing tandem fusion of FKBP and FRB to facilitate homodimerization with rapamycin or rapalogs a MC-Rap (iFRBFwtMC) construct was made, which had a MyD88/CD40 fusion with wild-type FKBP and FRB_{L}. MC-Rap was expressed together with a CAR directed against CD19 with the two cistrons separated by a 2A sequence (FIG. 53). With this construct, a rapalog was chosen to bind to the wild-type FKBP present on MC-Rap and together facilitate dimerization with the FRB present on a second MC-Rap. To determine if dimerization of MC-Rap with this technique could direct activation of MC and costimulatory function, retroviral construct 1440 containing MC-Rap was compared with two iMC+CARζ constructs containing the same CAR but which include two tandem copies of rimiducid sensitive Fᵥ or an uninducible MC only construct (1151). When transduced into T cells, the expression of IL-6 which relies on MC function was observed at moderate levels with MC activity alone and was not induced with either the rapalog C7-isobutyloxyrapamycin or rimiducid (FIG. 54). IL-6 induction from the iMC+CARζ−T cells containing either BP0774 with Fv.Fv fused to the carboxy terminus of MC or BP1433 with amino terminal Fv fusions secreted high levels of IL-6 in the presence of but not with isobutyloxyrapamycin. The term “tethered” in FIG. 54 refers to FRB and FKBP polypeptides tethered to a MyD88-CD40 polypeptide. In contrast, BP1440 which expresses MC with a carboxy terminal fusion of wild-type FKBP in tandem with FRB_{L} was not responsive to rimiducid, but strongly induces IL-6 secretion by activation of MC. When probed with an antibody to MyD88 in a western blot, the expression levels of MC.FK_{WT}. FRB_{L} were similar to those expressed by 1433 (also a carboxyl terminal fusion but with Fᵥs) and MC alone (FIG. 55). The dose responsiveness of the iMC+CARζ and MC-Rap-CAR constructs was determined in a sensitive reporter assay in which signaling through MC activates the transcription factor NF-KB (FIG. 56). BP774 was strongly induced by subnanomolar concentrations of rimiducid but not by rapamycin or isobutyloxyrapamycin. In contrast subnanomolar concentrations of rapamycin or isobutyloxyrapamycin were sufficient to induce MC-Rap in BP1440 but rimiducid even at 50 nM remained inert to MC function because of the specificity of the drug for Fᵥ.

(FRBFwtMC/FvC9): A Dual-Switch Activating Costimulation with Rapalog and Apoptosis with Rimiducid

[0839] The specificity of MC-Rap for activation with rapalogs but not with rimiducid permitted its employment as a second dual-switch (FRBFwtMC/FvC9) (FIG. 57). In this strategy MC-Rap was coexpressed with a first generation CAR and iC9. Rimiducid was used to activate caspase-9 as a safety switch while the rapalog isobutyloxyrapamycin which binds with FRB_{L} at concentrations 20 fold lower than the wild-type FRB in mTOR (which would inhibit T cell function) can specifically activate MC-Rap. This scheme was the reverse of (FwtFRBC9/MC.FvFv) which activates apoptosis with rapamycin (or rapalog) and activates costimulation with iMC and rimiducid. The drug specificity of the two strategies was demonstrated in a cell killing assay in culture (FIG. 58). The i9+CARζ+MC construct BP0844 which encodes a CD19CAR with iC9 and a constitutive or BP1160 expressing FRBFwtMC/FvC9 or BP1300 expressing FwtFRBC9/MC.FvFv was cocultured with the Raji Burkitt lymphoma cell line that expresses CD19. Tumor killing was ablated by activation of the safety switch with rimiducid both with the i9+CARζ+MC or FRBFwtMC/FvC9 formats. In contrast rapamycin or isobutyloxyrapamycin activated the iRC9 in FwtFRBC9/MC.FvFv and specifically ablated the immune response to tumor.

### REFERENCES

[0840] The following references are referred to in the present Example, and are hereby incorporated by reference herein in the present application, in their entireties.
[0841] 1. Straathof K C, Pule M A, Yotnda P, Dotti G, Vanin E F, Brenner M K, Heslop H E, Spencer D M, and Rooney C M. An inducible caspase 9 safety switch for T-cell therapy. Blood. 2005; 105 (11): 4247-54.
[0842] 2. Fan L, Freeman K W, Khan T, Pham E, and Spencer D M. Improved artificial death switches based on caspases and FADD. Hum Gene Ther. 1999; 10 (14): 2273-85.
[0843] 3. Spencer D M, Wandless T J, Schreiber S L, and Crabtree G R. Controlling signal transduction with synthetic ligands. Science. 1993; 262 (5136): 1019-24.
[0844] 4. Acevedo V D, Gangula R D, Freeman K W, Li R, Zhang Y, Wang F, Ayala G E, Peterson L E, Ittmann M, and Spencer D M. Inducible FGFR-1 activation leads to irreversible prostate adenocarcinoma and an epithelial-to-mesenchymal transition. Cancer Cell. 2007; 12 (6): 559-71.
[0845] 5. Spencer D M, Belshaw P J, Chen L, Ho S N, Randazzo F, Crabtree G R, and Schreiber S L. Functional analysis of Fas signaling in vivo using synthetic inducers of dimerization. Curr Biol. 1996; 6 (7): 839-47.
[0846] 6. Strasser A, Cory S, and Adams J M. Deciphering the rules of programmed cell death to improve therapy of cancer and other diseases. EMBO J. 2011; 30 (18): 3667-83.
[0847] 7. Narayanan P, Lapteva N, Seethammagari M, Levitt J M, Slawin K M, and Spencer D M. A composite MyD88/CD40 switch synergistically activates mouse and human dendritic cells for enhanced antitumor efficacy. J Clin Invest. 2011; 121 (4): 1524-34.
[0848] 8. Sabatini D M, Erdjument-Bromage H, Lui M, Tempst P, and Snyder S H. RAFT1: a mammalian protein that binds to FKBP12 in a rapamycin-dependent fashion and is homologous to yeast TORs. Cell. 1994; 78 (1): 35-43.
[0849] 9. Brown E J, Albers M W, Shin T B, Ichikawa K, Keith C T, Lane W S, and Schreiber S L. A mammalian protein targeted by G1-arresting rapamycin-receptor complex. Nature. 1994; 369 (6483): 756-8.
[0850] 10. Chen J, Zheng X F, Brown E J, and Schreiber S L. Identification of an 11-kDa FKBP12-rapamycin-binding domain within the 289-kDa FKBP12-rapamycin-associated protein and characterization of a critical serine residue. Proc Natl Acad Sci USA. 1995; 92 (11): 4947-51.
[0851] 11. Choi J, Chen J, Schreiber S L, and Clardy J. Structure of the FKBP12-rapamycin complex interacting with the binding domain of human FRAP. Science. 1996; 273 (5272): 239-42.
[0852] 12. Ho S N, Biggar S R, Spencer D M, Schreiber S L, and Crabtree G R. Dimeric ligands define a role for transcriptional activation domains in reinitiation. Nature. 1996; 382 (6594): 822-6.
[0853] 13. Klemm J D, Beals C R, and Crabtree G R. Rapid targeting of nuclear proteins to the cytoplasm. Curr Biol. 1997; 7 (9): 638-44.
[0854] 14. Bayle J H, Grimley J S, Stankunas K, Gestwicki J E, Wandless T J, and Crabtree G R. Rapamycin analogs with differential binding specificity permit orthogonal control of protein activity. Chem Biol. 2006; 13 (1): 99-107.
[0855] 15. Stankunas K, Bayle J H, Gestwicki J E, Lin Y M, Wandless T J, and Crabtree G R. Conditional protein alleles using knockin mice and a chemical inducer of dimerization. Mol Cell. 2003; 12 (6): 1615-24.
[0856] 16. Stankunas K, Bayle J H, Havranek J J, Wandless T J, Baker D, Crabtree G R, and Gestwicki J E. Rescue of Degradation-Prone Mutants of the FK506-Rapamycin Binding (FRB) Protein with Chemical Ligands. Chembiochem. 2007.
[0857] 17. Liberles S D, Diver S T, Austin D J, and Schreiber S L. Inducible gene expression and protein translocation using nontoxic ligands identified by a mammalian three-hybrid screen. Proc Natl Acad Sci USA. 1997; 94 (15): 7825-30.
[0858] 18. Luengo J I, Yamashita D S, Dunnington D, Beck A K, Rozamus L W, Yen H K, Bossard M J, Levy M A, Hand A, Newman-Tarr T, et al. Structure-activity studies of rapamycin analogs: evidence that the C-7 methoxy group is part of the effector domain and positioned at the FKBP12-FRAP interface. Chem Biol. 1995; 2 (7): 471-81.

### APPENDICES to the Present Example:

Appendix 1: pBP1300-pSFG-FKBP.FRB.ΔC9.T2A-αCD19.Q.CD8stm.ζ.P2A-iMC

| | | SEQ | | SEQ |
|---|---|---|---|---|
| Fragment | Nucleotide | ID NO: | Peptide | ID NO: |
| Leader | ATGCtcgagcaattg | 926 | MLEQL | 927 |
| peptide | | | | |
| FKBP″(wt) | GGcGTGCAaGTGGAaACTATaAGC | 928 | GVQVETISPGDGRTFPKRGQTCV | 929 |
| | CCgGGAGAcGGCcGcACATTtCCC | | VHYTGMLEDGKKFDSSRDRNKPF | |
| | AAgAGAGGcCAGACcTGCGTgGTG | | KFMLGKQEVIRGVVEEGVAQMSVG | |
| | CAcTATACaGGAATGCTGGAgGAC | | QRAKLTISPDYAYGATGHPGIIPPH | |
| | GGgAAGAAaTTCGAtAGCtcCCGGG | | ATLVFDVELLKLE | |
| | AtCGAAAtAAGCCtTTCAAaTTCATG | | | |
| | CTGGGcAAGCAaGAAGTcATCaGa | | | |
| | GGCTGGGAaGAAGGcGTCGCcCA | | | |
| | GATGTCcGTGGGtCAGcGcGCCAA | | | |
| | gCTGACaATTAGtCCAGAtTACGCc | | | |
| | TATGGcGCAACaGGCCAtCCCGGc | | | |
| | ATCATcCCCCCaCATGCcACACTc | | | |
| | GTCTTtGATGTcGAGCTcCTGAAaC | | | |
| | TGGAg | | | |
| Linker | GGCGGGcaattg | 930 | ggql | 931 |
| FRB | gaaatgTGGCATGAAGGGTTGGAAG | 932 | EMWHEGLEEASRLYFGERNVKG | 933 |
| | AAGCTTCAAGGCTGTACTTCGGA | | MFEVLEPLHAMMERGPQTLKETS | |
| | GAGAGGAACGTGAAGGGCATGTT | | FNQAYGRDLMEAQEWCRKYMKS | |
| | TGAGGTTCTTGAACCTCTGCACG | | GNVKDLTQAVVDLYYHVFRRISK | |
| | CCATGATGGAACGGGGACCGCAG | | | |
| | ACACTGAAAGAAACCTCTTTTAAT | | | |
| | CAGGCCTACGGCAGAGACCTGAT | | | |
| | GGAGGCCCAAGAATGGTGTAGAA | | | |
| | AGTATATGAAATCCGGTAACGTGA | | | |
| | AAGACCTGactCAGGCCTGGGACC | | | |
| | TTTATTACCATGTGTTCAGGCGGA | | | |
| | TCAGTAAG | | | |
| Linker | TCAGGCGGTGGCTCAGGTccatgg | 934 | SGGGSGPW | 935 |
| Δcaspase9 | GGATTTGGTGATGTCGGTGCTCT | 936 | GFGDVGALESLRGNADLAYILSME | 937 |
| | TGAGAGTTTGAGGGGAAATGCAG | | PCGHCLIINNVNFCRESGLRTRTG | |
| | ATTTGGCTTACATCCTGAGCATGG | | SNIDCEKLRRRFSSLHFMVEVKGD | |
| | AGCCCTGTGGCCACTGCCTCATT | | LTAKKMVLALLELARQDHGALDCC | |
| | ATCAACAATGTGAACTTCTGCCGT | | VVVILSHGCQASHLQFPGAVYGTD | |
| | GAGTCCGGGCTCCGCACCCGCA | | GCPVSVEKIVNIFNGTSCPSLGGK | |
| | CTGGCTCCAACATCGACTGTGAG | | PKLFFIQACGGEQKDHGFEVASTS | |
| | AAGTTGCGGCGTCGCTTCTCCTC | | PEDESPGSNPEPDATPFQEGLRT | |
| | GCTGCATTTCATGGTGGAGGTGA | | FDQLDAISSLPTPSDIFVSYSTFPG | |
| | AGGGCGACCTGACTGCCAAGAAA | | FVSWRDPKSGSVVYVETLDDIFEQ | |
| | ATGGTGCTGGCTTTGCTGGAGCT | | WAHSEDLQSLLLRVANAVSVKGIY | |
| | GGCGCgGCAGGACCACGGTGCTC | | KQMPGCFNFLRKKLFFKTSASRA | |
| | TGGACTGCTGCGTGGTGGTCATT | | | |
| | CTCTCTCACGGCTGTCAGGCCAG | | | |
| | CCACCTGCAGTTCCCAGGGGCTG | | | |
| | TCTACGGCACAGATGGATGCCCT | | | |
| | GTGTCGGTCGAGAAGATTGTGAA | | | |
| | CATCTTCAATGGGACCAGCTGCC | | | |
| | CCAGCCTGGGAGGGAAGCCCAA | | | |
| | GCTCTTTTTCATCCAGGCCTGTGG | | | |
| | TGGGGAGCAGAAAGAtCATGGGT | | | |
| | TTGAGGTGGCCTCCACTTCCCCT | | | |
| | GAAGACGAGTCCCCTGGCAGTAA | | | |
| | CCCCGAGCCAGATGCCACCCCGT | | | |
| | TCCAGGAAGGTTTGAGGACCTTC | | | |
| | GACCAGCTGGACGCCATATCTAG | | | |
| | TTTGCCCACACCCAGTGACATCTT | | | |
| | TGTGTCCTACTCTACTTTCCCAGG | | | |
| | TTTTGTTTCCTGGAGGGACCCCAA | | | |
| | GAGTGGCTCCTGGTACGTTGAGA | | | |
| | CCCTGGACGACATCTTTGAGCAG | | | |
| | TGGGCTCACTCTGAAGACCTGCA | | | |
| | GTCCCTCCTGCTTAGGGTCGCTA | | | |
| | ATGCTGTTTCGGTGAAAGGGATTT | | | |
| | ATAAACAGATGCCTGGTTGCTTTA | | | |
| | ATTTCCTCCGGAAAAAACTTTTCT | | | |
| | TTAAAACATCAGCTAGCAGAGCC | | | |
| Linker | ggatctggaccgcGG | 938 | GSGPR | 939 |
| T2A | GAAGGCCGAGGGAGCCTGCTGA | 940 | EGRGSLLTCGDVEENPGP | 941 |
| | CATGTGGCGATGTGGAGGAAAAC | | | |
| | CCAGGACCA | | | |
| Linker | CCATGG | 942 | PW | 943 |
| Signal | ATGGAGTTTGGACTTTCTTGGTTG | 944 | MEFGLSWLFLVAILKGVQCSR | 945 |
| Peptide | TTTTTGGTGGCAATTCTGAAGGGT | | | |
| | GTCCAGTGTAGCAGG | | | |
| FMC63 VL | GACATCCAGATGACACAGACTAC | 946 | DIQMTQTTSSLSASLGDRVTISCR | 947 |
| | ATCCTCCCTGTCTGCCTCTCTGG | | ASQDISKYLNVVYQQKPDGTVKLLI | |
| | GAGACAGAGTCACCATCAGTTGC | | YHTSRLHSGVPSRFSGSGSGTDY | |
| | AGGGCAAGTCAGGACATTAGTAA | | SLTISNLEQEDIATYFCQQGNTLPY | |
| | ATATTTAAATTGGTATCAGCAGAA | | TFGGGTKLEIT | |
| | ACCAGATGGAACTGTTAAACTCCT | | | |
| | GATCTACCATACATCAAGATTACA | | | |
| | CTCAGGAGTCCCATCAAGGTTCA | | | |
| | GTGGCAGTGGGTCTGGAACAGAT | | | |
| | TATTCTCTCACCATTAGCAACCTG | | | |
| | GAGCAAGAAGATATTGCCACTTAC | | | |
| | TTTTGCCAACAGGGTAATACGCTT | | | |
| | CCGTACACGTTCGGAGGGGGGA | | | |
| | CTAAGTTGGAAATAACA | | | |
| Flex | GGCGGAGGAAGCGGAGGTGGGG | 948 | gggsgggg | 949 |
| | GC | | | |
| FMC63 VH | GAGGTGAAACTGCAGGAGTCAGG | 950 | EVKLQESGPGLVAPSQSLSVTCTV | 951 |
| | ACCTGGCCTGGTGGCGCCCTCAC | | SGVSLPDYGVSWIRQPPRKGLEW | |
| | AGAGCCTGTCCGTCACATGCACT | | LGVIWGSETTYYNSALKSRLTIIKD | |
| | GTCTCAGGGGTCTCATTACCCGA | | NSKSQVFLKMNSLQTDDTAIYYCA | |
| | CTATGGTGTAAGCTGGATTCGCC | | KHYYYGGSYAMDYWGQGTSVTV | |
| | AGCCTCCACGAAAGGGTCTGGAG | | SS | |
| | TGGCTGGGAGTAATATGGGGTAG | | | |
| | TGAAACCACATACTATAATTCAGC | | | |
| | TCTCAAATCCAGACTGACCATCAT | | | |
| | CAAGGACAACTCCAAGAGCCAAG | | | |
| | TTTTCTTAAAAATGAACAGTCTGC | | | |
| | AAACTGATGACACAGCCATTTACT | | | |
| | ACTGTGCCAAACATTATTACTACG | | | |
| | GTGGTAGCTATGCTATGGACTACT | | | |
| | GGGGTCAAGGAACCTCAGTCACC | | | |
| | GTCTCCTCA | | | |
| Linker | GGATCC | 952 | gs | 953 |
| CD34 | GAACTTCCTACTCAGGGGACTTTC | 954 | ELPTQGTFSNVSTNVS | 955 |
| epitope | TCAAACGTTAGCACAAACGTAAGT | | | |
| CD8 stalk | CCCGCCCCAAGACCCCCCACACC | 956 | PAPRPPTPAPTIASQPLSLRPEAC | 957 |
| | TGCGCCGACCATTGCTTCTCAAC | | RPAAGGAVHTRGLDFACD | |
| | CCCTGAGTTTGAGACCCGAGGCC | | | |
| | TGCCGGCCAGCTGCCGGCGGGG | | | |
| | CCGTGCATACAAGAGGACTCGAT | | | |
| | TTCGCTTGCGAC | | | |
| CD8 | ATCTATATCTGGGCACCTCTCGCT | 958 | IYIWAPLAGTCGVLLLSLVITLYCNH | 959 |
| trans- | GGCACCTGTGGAGTCCTTCTGCT | | RNRRRVCKCPR | |
| membrane | CAGCCTGGTTATTACTCTGTACTG | | | |
| | TAATCACCGGAATCGCCGCCGCG | | | |
| | TTTGTAAGTGTCCCAGG | | | |
| Linker | GTCGAC | 960 | VD | 961 |
| CD3ζ | AGAGTGAAGTTCAGCAGGAGCGC | 962 | RVKFSRSADAPAYQQGQNQLYNE | 963 |
| | AGACGCCCCCGCGTACCAGCAG | | LNLGRREEYDVLDKRRGRDPEMG | |
| | GGCCAGAACCAGCTCTATAACGA | | GKPRRKNPQEGLYNELQKDKMAE | |
| | GCTCAATCTAGGACGAAGAGAGG | | AYSEIGMKGERRRGKGHDGLYQG | |
| | AGTACGATGTTTTGGACAAGAGA | | LSTATKDTYDALHMQALPPR | |
| | CGTGGCCGGGACCCTGAGATGG | | | |
| | GGGGAAAGCCGAGAAGGAAGAA | | | |
| | CCCTCAGGAAGGCCTGTACAATG | | | |
| | AACTGCAGAAAGATAAGATGGCG | | | |
| | GAGGCCTACAGTGAGATTGGGAT | | | |
| | GAAAGGCGAGCGCCGGAGGGGC | | | |
| | AAGGGGCACGATGGCCTTTACCA | | | |
| | GGGTCTCAGTACAGCCACCAAGG | | | |
| | ACACCTACGACGCCCTTCACATG | | | |
| | CAAGCTCTTCCACCTCGT | | | |
| Linker | gGAACGCGTGGATCGGGA | 964 | GTRGSG | 965 |
| P2A | GCTACTAACTTCAGCCTGCTGAA | 966 | ATNFSLLKQAGDVEENPGP | 967 |
| | GCAGGCTGGAGACGTGGAGGAG | | | |
| | AACcccgggcct | | | |
| MyD88 | atggctgcaggaggtcccggcgcggggtctgcg | 968 | SEQ ID NO: 305 | 969 |
| | gccccggtctcctccacatcctcccttcccctggct | | MAAGGPGAGSAAPVSSTSSLPLA | |
| | gctctcaacatgcgagtgcggcgccgcctgtctct | | ALNMRVRRRLSLFLNVRTQVAAD | |
| | gttcttgaacgtgcggacacaggtggcggccga | | WTALAEEMDFEYLEIRQLETQADP | |
| | ctggaccgcgctggcggaggagatggactttga | | TGRLLDAWQGRPGASVGRLLDLL | |
| | gtacttggagatccggcaactggagacacaagc | | TKLGRDDVLLELGPSIEEDCQKYIL | |
| | ggaccccactggcaggctgctggacgcctggc | | KQQQEEAEKPLQVAAVDSSVPRT | |
| | agggacgccctggcgcctctgtaggccgactgc | | AELAGITTLDDPLGHMPERFDAFIC | |
| | tcgatctgcttaccaagctgggccgcgacgacgt | | YCPSDI | |
| | gctgctggagctgggacccagcattgaggagg | | | |
| | attgccaaaagtatatcttgaagcagcagcagg | | | |
| | aggaggctgagaagcctttacaggtggccgctg | | | |
| | tagacagcagtgtcccacggacagcagagctg | | | |
| | gcgggcatcaccacacttgatgaccccctgggg | | | |
| | catatgcctgagcgtttcgatgccttcatctgcta | | | |
| | ttgccccagcgacatc | | | |
| Linker | gtcgag | 970 | VE | 971 |
| CD40 | aaaaaggtggccaagaagccaaccaataagg | 972 | KKVAKKPTNKAPHPKQEPQEINFP | 973 |
| | ccccccaccccaagcaggagccccaggagat | | DDLPGSNTAAPVQETLHGCQPVT | |
| | caattttcccgacgatcttcctggctccaacactgc | | QEDGKESRISVQERQ | |
| | tgctccagtgcaggagactttacatggatgccaa | | | |
| | ccggtcacccaggaggatggcaaagagagtcg | | | |
| | catctcagtgcaggagagacag | | | |
| Linker | gtcgag | 974 | VE | 975 |
| FKBP_{V}_{^{′}} | GGcGTcCAaGTcGAaACcATtagtCCc | 976 | GVQVETISPGDGRTFPKRGQTCV | 977 |
| | GGcGAtGGcaGaACaTTtCCtAAaaG | | VHYTGMLEDGKKVDSSRDRNKPF | |
| | gGGaCAaACaTGtGTcGTcCAtTAtA | | KFMLGKQEVIRGVVEEGVAQMSVG | |
| | CaGGcATGtTgGAgGAcGGcAAaAA | | QRAKLTISPDYAYGATGHPGIIPPH | |
| | gGTgGAcagtagtaGaGAtcGcAAtAAa | | ATLVFDVELLKLE | |
| | CCtTTcAAaTTcATGtTgGGaAAaCAa | | | |
| | GAaGTcATtaGgGGaTGGGAgGAgG | | | |
| | GcGTgGCtCAaATGtccGTcGGcCAa | | | |
| | cGcGCtAAgCTcACcATcagcCCcGAc | | | |
| | TAcGCaTAcGGcGCtACcGGaCAtCC | | | |
| | cGGaATtATtCCcCCtCAcGCtACctTg | | | |
| | GTgTTtGAcGTcGAaCTgtTgAAgCTc | | | |
| | GAa | | | |
| Linker | gtcgag | 978 | VE | 979 |
| FKBP_{V} | ggagtgcaggtggagactatctccccaggagac | 980 | GVQVETISPGDGRTFPKRGQTCV | 981 |
| | gggcgcaccttccccaagcgcggccagacctg | | VHYTGMLEDGKKVDSSRDRNKPF | |
| | cgtggtgcactacaccgggatgcttgaagatgg | | KFMLGKQEVIRGVVEEGVAQMSVG | |
| | aaagaaagttgattcctcccgggacagaaaca | | QRAKLTISPDYAYGATGHPGIIPPH | |
| | agccctttaagtttatgctaggcaagcaggaggt | | ATLVFDVELLKLE | |
| | gatccgaggctgggaagaaggggttgcccaga | | | |
| | tgagtgtgggtcagagagccaaactgactatatc | | | |
| | tccagattatgcctatggtgccactgggcaccca | | | |
| | ggcatcatcccaccacatgccactctcgtcttcga | | | |
| | tgtggagcttctaaaactggaa | | | |
| STOP | TGA | 982 | stop | |

Appendix 2: pBP1308-pSFG-FKBP.FRB.ΔC9.T2A-αPSCA.Q.CD8stm.ζ.P2A-iMC

| | | SEQ | | SEQ |
|---|---|---|---|---|
| Fragment | Nucleotide | ID NO: | Peptide | ID NO: |
| Leader | ATGCtcgagcaattg | 983 | MLEQL | 984 |
| peptide | | | | |
| FKBP″(wt) | GGcGTGCAaGTGGAaACTATaAGC | 985 | GVQVETISPGDGRTFPKRGQTCV | 986 |
| | CCgGGAGAcGGCcGcACATTtCCC | | VHYTGMLEDGKKFDSSRDRNKPF | |
| | AAgAGAGGcCAGACcTGCGTgGTG | | KFMLGKQEVIRGVVEEGVAQMSVG | |
| | CAcTATACaGGAATGCTGGAgGAC | | QRAKLTISPDYAYGATGHPGIIPPH | |
| | GGgAAGAAaTTCGAtAGCtcCCGGG | | ATLVFDVELLKLE | |
| | AtCGAAAtAAGCCtTTCAAaTTCATG | | | |
| | CTGGGcAAGCAaGAAGTcATCaGa | | | |
| | GGCTGGGAaGAAGGcGTCGCcCA | | | |
| | GATGTCcGTGGGtCAGcGcGCCAA | | | |
| | gCTGACaATTAGtCCAGAtTACGCc | | | |
| | TATGGcGCAACaGGCCAtCCCGGc | | | |
| | ATCATcCCCCCaCATGCcACACTc | | | |
| | GTCTTtGATGTcGAGCTcCTGAAaC | | | |
| | TGGAg | | | |
| Linker | GGCGGGcaattg | 987 | ggql | 988 |
| FRB | gaaatgTGGCATGAAGGGTTGGAAG | 989 | EMWHEGLEEASRLYFGERNVKG | 990 |
| | AAGCTTCAAGGCTGTACTTCGGA | | MFEVLEPLHAMMERGPQTLKETS | |
| | GAGAGGAACGTGAAGGGCATGTT | | FNQAYGRDLMEAQEWCRKYMKS | |
| | TGAGGTTCTTGAACCTCTGCACG | | GNVKDLTQAVVDLYYHVFRRISK | |
| | CCATGATGGAACGGGGACCGCAG | | | |
| | ACACTGAAAGAAACCTCTTTTAAT | | | |
| | CAGGCCTACGGCAGAGACCTGAT | | | |
| | GGAGGCCCAAGAATGGTGTAGAA | | | |
| | AGTATATGAAATCCGGTAACGTGA | | | |
| | AAGACCTGactCAGGCCTGGGACC | | | |
| | TTTATTACCATGTGTTCAGGCGGA | | | |
| | TCAGTAAG | | | |
| Linker | TCAGGCGGTGGCTCAGGTccatgg | 991 | SGGGSGPW | 992 |
| Δcaspase9 | GGATTTGGTGATGTCGGTGCTCT | 993 | GFGDVGALESLRGNADLAYILSME | 994 |
| | TGAGAGTTTGAGGGGAAATGCAG | | PCGHCLIINNVNFCRESGLRTRTG | |
| | ATTTGGCTTACATCCTGAGCATGG | | SNIDCEKLRRRFSSLHFMVEVKGD | |
| | AGCCCTGTGGCCACTGCCTCATT | | LTAKKMVLALLELARQDHGALDCC | |
| | ATCAACAATGTGAACTTCTGCCGT | | VVVILSHGCQASHLQFPGAVYGTD | |
| | GAGTCCGGGCTCCGCACCCGCA | | GCPVSVEKIVNIFNGTSCPSLGGK | |
| | CTGGCTCCAACATCGACTGTGAG | | PKLFFIQACGGEQKDHGFEVASTS | |
| | AAGTTGCGGCGTCGCTTCTCCTC | | PEDESPGSNPEPDATPFQEGLRT | |
| | GCTGCATTTCATGGTGGAGGTGA | | FDQLDAISSLPTPSDIFVSYSTFPG | |
| | AGGGCGACCTGACTGCCAAGAAA | | FVSWRDPKSGSVVYVETLDDIFEQ | |
| | ATGGTGCTGGCTTTGCTGGAGCT | | WAHSEDLQSLLLRVANAVSVKGIY | |
| | GGCGCgGCAGGACCACGGTGCTC | | KQMPGCFNFLRKKLFFKTSASRA | |
| | TGGACTGCTGCGTGGTGGTCATT | | | |
| | CTCTCTCACGGCTGTCAGGCCAG | | | |
| | CCACCTGCAGTTCCCAGGGGCTG | | | |
| | TCTACGGCACAGATGGATGCCCT | | | |
| | GTGTCGGTCGAGAAGATTGTGAA | | | |
| | CATCTTCAATGGGACCAGCTGCC | | | |
| | CCAGCCTGGGAGGGAAGCCCAA | | | |
| | GCTCTTTTTCATCCAGGCCTGTGG | | | |
| | TGGGGAGCAGAAAGAtCATGGGT | | | |
| | TTGAGGTGGCCTCCACTTCCCCT | | | |
| | GAAGACGAGTCCCCTGGCAGTAA | | | |
| | CCCCGAGCCAGATGCCACCCCGT | | | |
| | TCCAGGAAGGTTTGAGGACCTTC | | | |
| | GACCAGCTGGACGCCATATCTAG | | | |
| | TTTGCCCACACCCAGTGACATCTT | | | |
| | TGTGTCCTACTCTACTTTCCCAGG | | | |
| | TTTTGTTTCCTGGAGGGACCCCAA | | | |
| | GAGTGGCTCCTGGTACGTTGAGA | | | |
| | CCCTGGACGACATCTTTGAGCAG | | | |
| | TGGGCTCACTCTGAAGACCTGCA | | | |
| | GTCCCTCCTGCTTAGGGTCGCTA | | | |
| | ATGCTGTTTCGGTGAAAGGGATTT | | | |
| | ATAAACAGATGCCTGGTTGCTTTA | | | |
| | ATTTCCTCCGGAAAAAACTTTTCT | | | |
| | TTAAAACATCAGCTAGCAGAGCC | | | |
| Linker | ggatctggaccgcGG | 995 | GSGPR | 996 |
| T2A | GAAGGCCGAGGGAGCCTGCTGA | 997 | EGRGSLLTCGDVEENPGP | 998 |
| | CATGTGGCGATGTGGAGGAAAAC | | | |
| | CCAGGACCA | | | |
| Linker | CCATGG | 999 | PW | 1000 |
| Signal | ATGGAGTTTGGACTTTCTTGGTTG | 1001 | MEFGLSVVLFLVAILKGVQCSR | 1002 |
| Peptide | TTTTTGGTGGCAATTCTGAAGGGT | | | |
| | GTCCAGTGTAGCAGG | | | |
| PSCA(A11) | GACATCCAACTGACGCAAAGCCC | 1003 | DIQLTQSPSTLSASMGDRVTITCSA | 1004 |
| VL | ATCTACACTCAGCGCTAGCATGG | | SSSVRFIHWYQQKPGKAPKRLIYD | |
| | GGGACAGGGTCACAATCACGTGC | | TSKLASGVPSRFSGSGSGTDFTLT | |
| | TCTGCCTCAAGTTCCGTTAGGTTT | | ISSLQPEDFATYYCQQWGSSPFTF | |
| | ATCCATTGGTATCAGCAGAAACCT | | GQGTKVEIK | |
| | GGAAAGGCCCCAAAAAGACTGAT | | | |
| | CTATGATACCAGCAAGCTGGCTT | | | |
| | CCGGAGTGCCCTCAAGGTTCTCA | | | |
| | GGATCTGGCAGTGGGACCGATTT | | | |
| | CACCCTGACAATTAGCAGCCTTCA | | | |
| | GCCAGAGGATTTCGCAACCTATTA | | | |
| | CTGTCAGCAATGGGGGTCCAGCC | | | |
| | CATTCACTTTCGGCCAAGGAACAA | | | |
| | AGGTGGAGATAAAA | | | |
| Flex | GGCGGAGGAAGCGGAGGTGGGG | 1005 | gggsgggg | 1006 |
| | GC | | | |
| PSCA(A11) | GAGGTGCAGCTCGTGGAGTATGG | 1007 | EVQLVEYGGGLVQPGGSLRLSCA | 1008 |
| VH | CGGGGGCCTGGTGCAGCCTGGG | | ASGFNIKDYYIHVVVRQAPGKGLE | |
| | GGTAGTCTGAGGCTCTCCTGCGC | | WVAWIDPENGDTEFVPKFQGRAT | |
| | TGCCTCTGGCTTTAACATTAAAGA | | MSADTSKNTAYLQMNSLRAEDTA | |
| | CTACTACATACATTGGGTGCGGC | | VYYCKTGGFWGQGTLVTVSS | |
| | AGGCCCCAGGCAAAGGGCTCGAA | | | |
| | TGGGTGGCCTGGATTGACCCTGA | | | |
| | GAATGGTGACACTGAGTTTGTCC | | | |
| | CCAAGTTTCAGGGCAGAGCCACC | | | |
| | ATGAGCGCTGACACAAGCAAAAA | | | |
| | CACTGCTTATCTCCAAATGAATAG | | | |
| | CCTGCGAGCTGAAGATACAGCAG | | | |
| | TCTATTACTGCAAGACGGGAGGA | | | |
| | TTCTGGGGCCAGGGAACTCTGGT | | | |
| | GACAGTTAGTTCC | | | |
| Linker | GGATCC | 1009 | gs | 1010 |
| CD34 | GAACTTCCTACTCAGGGGACTTTC | 1011 | ELPTQGTFSNVSTNVS | 1012 |
| epitope | TCAAACGTTAGCACAAACGTAAGT | | | |
| CD8 stalk | CCCGCCCCAAGACCCCCCACACC | 1013 | PAPRPPTPAPTIASQPLSLRPEAC | 1014 |
| | TGCGCCGACCATTGCTTCTCAAC | | RPAAGGAVHTRGLDFACD | |
| | CCCTGAGTTTGAGACCCGAGGCC | | | |
| | TGCCGGCCAGCTGCCGGCGGGG | | | |
| | CCGTGCATACAAGAGGACTCGAT | | | |
| | TTCGCTTGCGAC | | | |
| CD8 | ATCTATATCTGGGCACCTCTCGCT | 1015 | IYIWAPLAGTCGVLLLSLVITLYCNH | 1016 |
| trans- | GGCACCTGTGGAGTCCTTCTGCT | | RNRRRVCKCPR | |
| membrane | CAGCCTGGTTATTACTCTGTACTG | | | |
| | TAATCACCGGAATCGCCGCCGCG | | | |
| | TTTGTAAGTGTCCCAGG | | | |
| Linker | GTCGAC | 1017 | VD | 1018 |
| CD3ζ | AGAGTGAAGTTCAGCAGGAGCGC | 1019 | RVKFSRSADAPAYQQGQNQLYNE | 1020 |
| | AGACGCCCCCGCGTACCAGCAG | | LNLGRREEYDVLDKRRGRDPEMG | |
| | GGCCAGAACCAGCTCTATAACGA | | GKPRRKNPQEGLYNELQKDKMAE | |
| | GCTCAATCTAGGACGAAGAGAGG | | AYSEIGMKGERRRGKGHDGLYQG | |
| | AGTACGATGTTTTGGACAAGAGA | | LSTATKDTYDALHMQALPPR | |
| | CGTGGCCGGGACCCTGAGATGG | | | |
| | GGGGAAAGCCGAGAAGGAAGAA | | | |
| | CCCTCAGGAAGGCCTGTACAATG | | | |
| | AACTGCAGAAAGATAAGATGGCG | | | |
| | GAGGCCTACAGTGAGATTGGGAT | | | |
| | GAAAGGCGAGCGCCGGAGGGGC | | | |
| | AAGGGGCACGATGGCCTTTACCA | | | |
| | GGGTCTCAGTACAGCCACCAAGG | | | |
| | ACACCTACGACGCCCTTCACATG | | | |
| | CAAGCTCTTCCACCTCGT | | | |
| Linker | gGAACGCGTGGATCGGGA | 1021 | GTRGSG | 1022 |
| P2A | GCTACTAACTTCAGCCTGCTGAA | 1023 | ATNFSLLKQAGDVEENPGP | 1024 |
| | GCAGGCTGGAGACGTGGAGGAG | | | |
| | AACcccgggcct | | | |
| MyD88 | atggctgcaggaggtcccggcgcggggtctgcg | 1025 | MAAGGPGAGSAAPVSSTSSLPLA | 1026 |
| | gccccggtctcctccacatcctcccttcccctggct | | ALNMRVRRRLSLFLNVRTQVAAD | |
| | gctctcaacatgcgagtgcggcgccgcctgtctct | | WTALAEEMDFEYLEIRQLETQADP | |
| | gttcttgaacgtgcggacacaggtggcggccga | | TGRLLDAWQGRPGASVGRLLDLL | |
| | ctggaccgcgctggcggaggagatggactttga | | TKLGRDDVLLELGPSIEEDCQKYIL | |
| | gtacttggagatccggcaactggagacacaagc | | KQQQEEAEKPLQVAAVDSSVPRT | |
| | ggaccccactggcaggctgctggacgcctggc | | AELAGITTLDDPLGHMPERFDAFIC | |
| | agggacgccctggcgcctctgtaggccgactgc | | YCPSDI | |
| | tcgatctgcttaccaagctgggccgcgacgacgt | | | |
| | gctgctggagctgggacccagcattgaggagg | | | |
| | attgccaaaagtatatcttgaagcagcagcagg | | | |
| | aggaggctgagaagcctttacaggtggccgctg | | | |
| | tagacagcagtgtcccacggacagcagagctg | | | |
| | gcgggcatcaccacacttgatgaccccctgggg | | | |
| | catatgcctgagcgtttcgatgccttcatctgctatt | | | |
| | gccccagcgacatc | | | |
| Linker | gtcgag | 1027 | VE | 1028 |
| CD40 | aaaaaggtggccaagaagccaaccaataagg | 1029 | KKVAKKPTNKAPHPKQEPQEINFP | 1030 |
| | ccccccaccccaagcaggagccccaggagat | | DDLPGSNTAAPVQETLHGCQPVT | |
| | caattttcccgacgatcttcctggctccaacactgc | | QEDGKESRISVQERQ | |
| | tgctccagtgcaggagactttacatggatgccaa | | | |
| | ccggtcacccaggaggatggcaaagagagtcg | | | |
| | catctcagtgcaggagagacag | | | |
| Linker | gtcgag | 1031 | VE | 1032 |
| FKBP_{V}_{^{′}} | GGcGTcCAaGTcGAaACcATtagtCCc | 1033 | GVQVETISPGDGRTFPKRGQTCV | 1034 |
| | GGcGAtGGcaGaACaTTtCCtAAaaG | | VHYTGMLEDGKKVDSSRDRNKPF | |
| | gGGaCAaACaTGtGTcGTcCAtTAtA | | KFMLGKQEVIRGWEEGVAQMSVG | |
| | CaGGcATGtTgGAgGAcGGcAAaAA | | QRAKLTISPDYAYGATGHPGIIPPH | |
| | gGTgGAcagtagtaGaGAtcGcAAtAAa | | ATLVFDVELLKLE | |
| | CCtTTcAAaTTcATGtTgGGaAAaCAa | | | |
| | GAaGTcATtaGgGGaTGGGAgGAgG | | | |
| | GcGTgGCtCAaATGtccGTcGGcCAa | | | |
| | cGcGCtAAgCTcACcATcagcCCcGAc | | | |
| | TAcGCaTAcGGcGCtACcGGaCAtCC | | | |
| | cGGaATtATtCCcCCtCAcGCtACctTg | | | |
| | GTgTTtGAcGTcGAaCTgtTgAAgCTc | | | |
| | GAa | | | |
| Linker | gtcgag | 1035 | VE | 1036 |
| FKBP_{V} | ggagtgcaggtggagactatctccccaggagac | 1037 | GVQVETISPGDGRTFPKRGQTCV | 1038 |
| | gggcgcaccttccccaagcgcggccagacctg | | VHYTGMLEDGKKVDSSRDRNKPF | |
| | cgtggtgcactacaccgggatgcttgaagatgg | | KFMLGKQEVIRGVVEEGVAQMSVG | |
| | aaagaaagttgattcctcccgggacagaaaca | | QRAKLTISPDYAYGATGHPGIIPPH | |
| | agccctttaagtttatgctaggcaagcaggaggt | | ATLVFDVELLKLE | |
| | gatccgaggctgggaagaaggggttgcccaga | | | |
| | tgagtgtgggtcagagagccaaactgactatatc | | | |
| | tccagattatgcctatggtgccactgggcaccca | | | |
| | ggcatcatcccaccacatgccactctcgtcttcga | | | |
| | tgtggagcttctaaaactggaa | | | |
| STOP | TGA | 1039 | stop | |

Appendix 3: pBP1310-pSFG.FRB.FKBP.ΔC9.T2A-ΔCD19

| | | SEQ | | SEQ |
|---|---|---|---|---|
| Fragment | Nucleotide | ID NO: | Peptide | ID NO: |
| Leader | ATGCtcgag | 1040 | MLE | 1041 |
| peptide | | | | |
| FRB | gaaatgTGGCATGAAGGGTTGGAAG | 1042 | EMWHEGLEEASRLYFGERNVKG | 1043 |
| | AAGCTTCAAGGCTGTACTTCGGA | | MFEVLEPLHAMMERGPQTLKETS | |
| | GAGAGGAACGTGAAGGGCATGTT | | FNQAYGRDLMEAQEWCRKYMKS | |
| | TGAGGTTCTTGAACCTCTGCACG | | GNVKDLTQAVVDLYYHVFRRISK | |
| | CCATGATGGAACGGGGACCGCAG | | | |
| | ACACTGAAAGAAACCTCTTTTAAT | | | |
| | CAGGCCTACGGCAGAGACCTGAT | | | |
| | GGAGGCCCAAGAATGGTGTAGAA | | | |
| | AGTATATGAAATCCGGTAACGTGA | | | |
| | AAGACCTGactCAGGCCTGGGACC | | | |
| | TTTATTACCATGTGTTCAGGCGGA | | | |
| | TCAGTAAG | | | |
| Linker | TCAGGCGGTGGCTCAGGT | 1044 | SGGGSG | 1045 |
| FKBP wt | GGcGTcCAaGTcGAaACcATtagtCCc | 1046 | GVQVETISPGDGRTFPKRGQTCV | 1047 |
| | GGcGAtGGcaGaACaTTtCCtAAaaG | | VHYTGMLEDGKKFDSSRDRNKPF | |
| | gGGaCAaACaTGtGTcGTcCAtTAtA | | KFMLGKQEVIRGVVEEGVAQMSVG | |
| | CaGGcATGtTgGAgGAcGGcAAaAA | | QRAKLTISPDYAYGATGHPGIIPPH | |
| | gTTCGAcagtagtaGaGAtcGcAAtAAa | | ATLVFDVELLKL | |
| | CCtTTcAAaTTcATGtTgGGaAAaCAa | | | |
| | GAaGTcATtaGgGGaTGGGAgGAgG | | | |
| | GcGTgGCtCAaATGtccGTcGGcCAa | | | |
| | cGcGCtAAgCTcACcATcagcCCcGAc | | | |
| | TAcGCaTAcGGcGCtACcGGaCAtCC | | | |
| | cggaattATtCCcCCtCAcGCtACctTgG | | | |
| | TgTTtGAcGTcGAaCTgtTgAAgCTc | | | |
| Linker | TCGGGGGGCGGATCAGGAGTCG | 1048 | SGGGSVD | 1049 |
| | AC | | | |
| Δcaspase9 | GGATTTGGTGATGTCGGTGCTCT | 1050 | GFGDVGALESLRGNADLAYILSME | 1051 |
| | TGAGAGTTTGAGGGGAAATGCAG | | PCGHCLIINNVNFCRESGLRTRTG | |
| | ATTTGGCTTACATCCTGAGCATGG | | SNIDCEKLRRRFSSLHFMVEVKGD | |
| | AGCCCTGTGGCCACTGCCTCATT | | LTAKKMVLALLELARQDHGALDCC | |
| | ATCAACAATGTGAACTTCTGCCGT | | VVVILSHGCQASHLQFPGAVYGTD | |
| | GAGTCCGGGCTCCGCACCCGCA | | GCPVSVEKIVNIFNGTSCPSLGGK | |
| | CTGGCTCCAACATCGACTGTGAG | | PKLFFIQACGGEQKDHGFEVASTS | |
| | AAGTTGCGGCGTCGCTTCTCCTC | | PEDESPGSNPEPDATPFQEGLRT | |
| | GCTGCATTTCATGGTGGAGGTGA | | FDQLDAISSLPTPSDIFVSYSTFPG | |
| | AGGGCGACCTGACTGCCAAGAAA | | FVSWRDPKSGSVVYVETLDDIFEQ | |
| | ATGGTGCTGGCTTTGCTGGAGCT | | WAHSEDLQSLLLRVANAVSVKGIY | |
| | GGCGCgGCAGGACCACGGTGCTC | | KQMPGCFNFLRKKLFFKTSASRA | |
| | TGGACTGCTGCGTGGTGGTCATT | | | |
| | CTCTCTCACGGCTGTCAGGCCAG | | | |
| | CCACCTGCAGTTCCCAGGGGCTG | | | |
| | TCTACGGCACAGATGGATGCCCT | | | |
| | GTGTCGGTCGAGAAGATTGTGAA | | | |
| | CATCTTCAATGGGACCAGCTGCC | | | |
| | CCAGCCTGGGAGGGAAGCCCAA | | | |
| | GCTCTTTTTCATCCAGGCCTGTGG | | | |
| | TGGGGAGCAGAAAGACCATGGGT | | | |
| | TTGAGGTGGCCTCCACTTCCCCT | | | |
| | GAAGACGAGTCCCCTGGCAGTAA | | | |
| | CCCCGAGCCAGATGCCACCCCGT | | | |
| | TCCAGGAAGGTTTGAGGACCTTC | | | |
| | GACCAGCTGGACGCCATATCTAG | | | |
| | TTTGCCCACACCCAGTGACATCTT | | | |
| | TGTGTCCTACTCTACTTTCCCAGG | | | |
| | TTTTGTTTCCTGGAGGGACCCCAA | | | |
| | GAGTGGCTCCTGGTACGTTGAGA | | | |
| | CCCTGGACGACATCTTTGAGCAG | | | |
| | TGGGCTCACTCTGAAGACCTGCA | | | |
| | GTCCCTCCTGCTTAGGGTCGCTA | | | |
| | ATGCTGTTTCGGTGAAAGGGATTT | | | |
| | ATAAACAGATGCCTGGTTGCTTTA | | | |
| | ATTTCCTCCGGAAAAAACTTTTCT | | | |
| | TTAAAACATCAGCTAGCAGAGCC | | | |
| Linker | ccgcGG | 1052 | PR | 1053 |
| T2A | GAAGGCCGAGGGAGCCTGCTGA | 1054 | EGRGSLLTCGDVEENPGP | 1055 |
| | CATGTGGCGATGTGGAGGAAAAC | | | |
| | CCAGGACCA | | | |
| ΔCD19 | ATGCCACCACCTCGCCTGCTGTT | 1056 | MPPPRLLFFLLFLTPMEVRPEEPL | 1057 |
| | CTTTCTGCTGTTCCTGACACCTAT | | VVKVEEGDNAVLQCLKGTSDGPT | |
| | GGAGGTGCGACCTGAGGAACCAC | | QQLTWSRESPLKPFLKLSLGLPGL | |
| | TGGTCGTGAAGGTCGAGGAAGGC | | GIHMRPLAIWLFIFNVSQQMGGFY | |
| | GACAATGCCGTGCTGCAGTGCCT | | LCQPGPPSEKAWQPGWTVNVEG | |
| | GAAAGGCACTTCTGATGGGCCAA | | SGELFRWNVSDLGGLGCGLKNRS | |
| | CTCAGCAGCTGACCTGGTCCAGG | | SEGPSSPSGKLMSPKLYVWAKDR | |
| | GAGTCTCCCCTGAAGCCTTTTCTG | | PEIWEGEPPCLPPRDSLNQSLSQD | |
| | AAACTGAGCCTGGGACTGCCAGG | | LTMAPGSTLWLSCGVPPDSVSRG | |
| | ACTGGGAATCCACATGCGCCCTC | | PLSWTHVHPKGPKSLLSLELKDDR | |
| | TGGCTATCTGGCTGTTCATCTTCA | | PARDMWVMETGLLLPRATAQDAG | |
| | ACGTGAGCCAGCAGATGGGAGGA | | KYYCHRGNLTMSFHLEITARPVLW | |
| | TTCTACCTGTGCCAGCCAGGACC | | HWLLRTGGWKVSAVTLAYLIFCLC | |
| | ACCATCCGAGAAGGCCTGGCAGC | | SLVGILHLQRALVLRRKRKRMTDP | |
| | CTGGATGGACCGTCAACGTGGAG | | TRRF | |
| | GGGTCTGGAGAACTGTTTAGGTG | | | |
| | GAATGTGAGTGACCTGGGAGGAC | | | |
| | TGGGATGTGGGCTGAAGAACCGC | | | |
| | TCCTCTGAAGGCCCAAGTTCACC | | | |
| | CTCAGGGAAGCTGATGAGCCCAA | | | |
| | AACTGTACGTGTGGGCCAAAGAT | | | |
| | CGGCCCGAGATCTGGGAGGGAG | | | |
| | AACCTCCATGCCTGCCACCTAGA | | | |
| | GACAGCCTGAATCAGAGTCTGTC | | | |
| | ACAGGATCTGACAATGGCCCCCG | | | |
| | GGTCCACTCTGTGGCTGTCTTGT | | | |
| | GGAGTCCCACCCGACAGCGTGTC | | | |
| | CAGAGGCCCTCTGTCCTGGACCC | | | |
| | ACGTGCATCCTAAGGGGCCAAAA | | | |
| | AGTCTGCTGTCACTGGAACTGAA | | | |
| | GGACGATCGGCCTGCCAGAGACA | | | |
| | TGTGGGTCATGGAGACTGGACTG | | | |
| | CTGCTGCCACGAGCAACCGCACA | | | |
| | GGATGCTGGAAAATACTATTGCCA | | | |
| | CCGGGGCAATCTGACAATGTCCT | | | |
| | TCCATCTGGAGATCACTGCAAGG | | | |
| | CCCGTGCTGTGGCACTGGCTGCT | | | |
| | GCGAACCGGAGGATGGAAGGTCA | | | |
| | GTGCTGTGACACTGGCATATCTG | | | |
| | ATCTTTTGCCTGTGCTCCCTGGTG | | | |
| | GGCATTCTGCATCTGCAGAGAGC | | | |
| | CCTGGTGCTGCGGAGAAAGAGAA | | | |
| | AGAGAATGACTGACCCAACAAGA | | | |
| | AGGTTT | | | |
| STOP | TGA | 1058 | stop | |

Appendix 4: pBP1311-pSFG.FKBP.FRB.ΔC9.T2A-ΔCD19

APPENDIX 4

| | | SEQ | | SEQ |
|---|---|---|---|---|
| Fragment | Nucleotide | ID NO: | Peptide | ID NO: |
| Leader | ATGCtcgag | 1059 | MLE | 1060 |
| peptide | | | | |
| FKBP wt | GGcGTcCAaGTcGAaACcATtagtCCc | 1061 | GVQVETISPGDGRTFPKRGQTCV | 1062 |
| | GGcGAtGGcaGaACaTTtCCtAAaaG | | VHYTGMLEDGKKFDSSRDRNKPF | |
| | gGGaCAaACaTGtGTcGTcCAtTAtA | | KFMLGKQEVIRGVVEEGVAQMSVG | |
| | CaGGcATGtTgGAgGAcGGcAAaAA | | QRAKLTISPDYAYGATGHPGIIPPH | |
| | gTTCGAcagtagtaGaGAtcGcAAtAAa | | ATLVFDVELLKL | |
| | CCtTTcAAaTTcATGtTgGGaAAaCAa | | | |
| | GAaGTcATtaGgGGaTGGGAgGAgG | | | |
| | GcGTgGCtCAaATGtccGTcGGcCAa | | | |
| | cGcGCtAAgCTcACcATcagcCCcGAc | | | |
| | TAcGCaTAcGGcGCtACcGGaCAtCC | | | |
| | cggaattATtCCcCCtCAcGCtACctTgG | | | |
| | TgTTtGAcGTcGAaCTgtTgAAgCTc | | | |
| Linker | TCGGGGGGCGGATCAGG | 1063 | SGGGS | 1064 |
| FRB | gaaatgTGGCATGAAGGGTTGGAAG | 1065 | EMVVHEGLEEASRLYFGERNVKG | 1066 |
| | AAGCTTCAAGGCTGTACTTCGGA | | MFEVLEPLHAMMERGPQTLKETS | |
| | GAGAGGAACGTGAAGGGCATGTT | | FNQAYGRDLMEAQEWCRKYMKS | |
| | TGAGGTTCTTGAACCTCTGCACG | | GNVKDLTQAVVDLYYHVFRRISK | |
| | CCATGATGGAACGGGGACCGCAG | | | |
| | ACACTGAAAGAAACCTCTTTTAAT | | | |
| | CAGGCCTACGGCAGAGACCTGAT | | | |
| | GGAGGCCCAAGAATGGTGTAGAA | | | |
| | AGTATATGAAATCCGGTAACGTGA | | | |
| | AAGACCTGactCAGGCCTGGGACC | | | |
| | TTTATTACCATGTGTTCAGGCGGA | | | |
| | TCAGTAAG | | | |
| Linker | TCAGGCGGTGGCTCAGGTGTCGA | 1067 | SGGGSGVD | 1068 |
| | C | | | |
| Δcaspase9 | GGATTTGGTGATGTCGGTGCTCT | 1069 | GFGDVGALESLRGNADLAYILSME | 1070 |
| | TGAGAGTTTGAGGGGAAATGCAG | | PCGHCLIINNVNFCRESGLRTRTG | |
| | ATTTGGCTTACATCCTGAGCATGG | | SNIDCEKLRRRFSSLHFMVEVKGD | |
| | AGCCCTGTGGCCACTGCCTCATT | | LTAKKMVLALLELARQDHGALDCC | |
| | ATCAACAATGTGAACTTCTGCCGT | | VVVILSHGCQASHLQFPGAVYGTD | |
| | GAGTCCGGGCTCCGCACCCGCA | | GCPVSVEKIVNIFNGTSCPSLGGK | |
| | CTGGCTCCAACATCGACTGTGAG | | PKLFFIQACGGEQKDHGFEVASTS | |
| | AAGTTGCGGCGTCGCTTCTCCTC | | PEDESPGSNPEPDATPFQEGLRT | |
| | GCTGCATTTCATGGTGGAGGTGA | | FDQLDAISSLPTPSDIFVSYSTFPG | |
| | AGGGCGACCTGACTGCCAAGAAA | | FVSWRDPKSGSVVYVETLDDIFEQ | |
| | ATGGTGCTGGCTTTGCTGGAGCT | | WAHSEDLQSLLLRVANAVSVKGIY | |
| | GGCGCgGCAGGACCACGGTGCTC | | KQMPGCFNFLRKKLFFKTSASRA | |
| | TGGACTGCTGCGTGGTGGTCATT | | | |
| | CTCTCTCACGGCTGTCAGGCCAG | | | |
| | CCACCTGCAGTTCCCAGGGGCTG | | | |
| | TCTACGGCACAGATGGATGCCCT | | | |
| | GTGTCGGTCGAGAAGATTGTGAA | | | |
| | CATCTTCAATGGGACCAGCTGCC | | | |
| | CCAGCCTGGGAGGGAAGCCCAA | | | |
| | GCTCTTTTTCATCCAGGCCTGTGG | | | |
| | TGGGGAGCAGAAAGACCATGGGT | | | |
| | TTGAGGTGGCCTCCACTTCCCCT | | | |
| | GAAGACGAGTCCCCTGGCAGTAA | | | |
| | CCCCGAGCCAGATGCCACCCCGT | | | |
| | TCCAGGAAGGTTTGAGGACCTTC | | | |
| | GACCAGCTGGACGCCATATCTAG | | | |
| | TTTGCCCACACCCAGTGACATCTT | | | |
| | TGTGTCCTACTCTACTTTCCCAGG | | | |
| | TTTTGTTTCCTGGAGGGACCCCAA | | | |
| | GAGTGGCTCCTGGTACGTTGAGA | | | |
| | CCCTGGACGACATCTTTGAGCAG | | | |
| | TGGGCTCACTCTGAAGACCTGCA | | | |
| | GTCCCTCCTGCTTAGGGTCGCTA | | | |
| | ATGCTGTTTCGGTGAAAGGGATTT | | | |
| | ATAAACAGATGCCTGGTTGCTTTA | | | |
| | ATTTCCTCCGGAAAAAACTTTTCT | | | |
| | TTAAAACATCAGCTAGCAGAGCC | | | |
| Linker | ccgcGG | 1071 | PR | 1072 |
| T2A | GAAGGCCGAGGGAGCCTGCTGA | 1073 | EGRGSLLTCGDVEENPGP | 1074 |
| | CATGTGGCGATGTGGAGGAAAAC | | | |
| | CCAGGACCA | | | |
| ΔCD19 | ATGCCACCACCTCGCCTGCTGTT | 1075 | MPPPRLLFFLLFLTPMEVRPEEPL | 1076 |
| | CTTTCTGCTGTTCCTGACACCTAT | | VVKVEEGDNAVLQCLKGTSDGPT | |
| | GGAGGTGCGACCTGAGGAACCAC | | QQLTWSRESPLKPFLKLSLGLPGL | |
| | TGGTCGTGAAGGTCGAGGAAGGC | | GIHMRPLAIVVLFIFNVSQQMGGFY | |
| | GACAATGCCGTGCTGCAGTGCCT | | LCQPGPPSEKAWQPGVVTVNVEG | |
| | GAAAGGCACTTCTGATGGGCCAA | | SGELFRWNVSDLGGLGCGLKNRS | |
| | CTCAGCAGCTGACCTGGTCCAGG | | SEGPSSPSGKLMSPKLYVWAKDR | |
| | GAGTCTCCCCTGAAGCCTTTTCTG | | PEIVVEGEPPCLPPRDSLNQSLSQD | |
| | AAACTGAGCCTGGGACTGCCAGG | | LTMAPGSTLWLSCGVPPDSVSRG | |
| | ACTGGGAATCCACATGCGCCCTC | | PLSVVTHVHPKGPKSLLSLELKDDR | |
| | TGGCTATCTGGCTGTTCATCTTCA | | PARDMVVVMETGLLLPRATAQDAG | |
| | ACGTGAGCCAGCAGATGGGAGGA | | KYYCHRGNLTMSFHLEITARPVLW | |
| | TTCTACCTGTGCCAGCCAGGACC | | HVVLLRTGGVVKVSAVTLAYLIFCLC | |
| | ACCATCCGAGAAGGCCTGGCAGC | | SLVGILHLQRALVLRRKRKRMTDP | |
| | CTGGATGGACCGTCAACGTGGAG | | TRRF | |
| | GGGTCTGGAGAACTGTTTAGGTG | | | |
| | GAATGTGAGTGACCTGGGAGGAC | | | |
| | TGGGATGTGGGCTGAAGAACCGC | | | |
| | TCCTCTGAAGGCCCAAGTTCACC | | | |
| | CTCAGGGAAGCTGATGAGCCCAA | | | |
| | AACTGTACGTGTGGGCCAAAGAT | | | |
| | CGGCCCGAGATCTGGGAGGGAG | | | |
| | AACCTCCATGCCTGCCACCTAGA | | | |
| | GACAGCCTGAATCAGAGTCTGTC | | | |
| | ACAGGATCTGACAATGGCCCCCG | | | |
| | GGTCCACTCTGTGGCTGTCTTGT | | | |
| | GGAGTCCCACCCGACAGCGTGTC | | | |
| | CAGAGGCCCTCTGTCCTGGACCC | | | |
| | ACGTGCATCCTAAGGGGCCAAAA | | | |
| | AGTCTGCTGTCACTGGAACTGAA | | | |
| | GGACGATCGGCCTGCCAGAGACA | | | |
| | TGTGGGTCATGGAGACTGGACTG | | | |
| | CTGCTGCCACGAGCAACCGCACA | | | |
| | GGATGCTGGAAAATACTATTGCCA | | | |
| | CCGGGGCAATCTGACAATGTCCT | | | |
| | TCCATCTGGAGATCACTGCAAGG | | | |
| | CCCGTGCTGTGGCACTGGCTGCT | | | |
| | GCGAACCGGAGGATGGAAGGTCA | | | |
| | GTGCTGTGACACTGGCATATCTG | | | |
| | ATCTTTTGCCTGTGCTCCCTGGTG | | | |
| | GGCATTCTGCATCTGCAGAGAGC | | | |
| | CCTGGTGCTGCGGAGAAAGAGAA | | | |
| | AGAGAATGACTGACCCAACAAGA | | | |
| | AGGTTT | | | |
| STOP | TGA | 1077 | stop | |

Appendix 5: pBP1316-pSFG-FKBP.FRB_{L}.ΔC9.T2A-αPSCA.Q.CD8stm.ζ.P2A-iMC

| | | SEQ | | SEQ |
|---|---|---|---|---|
| Fragment | Nucleotide | ID NO: | Peptide | ID NO: |
| Leader | ATGCtcgagcaattg | 1078 | MLEQL | 1079 |
| peptide | | | | |
| FKBP″wt | GGcGTGCAaGTGGAaACTATaAGC | 1080 | GVQVETISPGDGRTFPKRGQTCV | 1081 |
| | CCgGGAGAcGGCcGcACATTtCCC | | VHYTGMLEDGKKFDSSRDRNKPF | |
| | AAgAGAGGcCAGACcTGCGTgGTG | | KFMLGKQEVIRGVVEEGVAQMSVG | |
| | CAcTATACaGGAATGCTGGAgGAC | | QRAKLTISPDYAYGATGHPGIIPPH | |
| | GGgAAGAAaTTCGAtAGCtcCCGGG | | ATLVFDVELLKLE | |
| | AtCGAAAtAAGCCtTTCAAaTTCATG | | | |
| | CTGGGcAAGCAaGAAGTcATCaGa | | | |
| | GGCTGGGAaGAAGGcGTCGCcCA | | | |
| | GATGTCcGTGGGtCAGcGcGCCAA | | | |
| | gCTGACaATTAGtCCAGAtTACGCc | | | |
| | TATGGcGCAACaGGCCAtCCCGGc | | | |
| | ATCATcCCCCCaCATGCcACACTc | | | |
| | GTCTTtGATGTcGAGCTcCTGAAaC | | | |
| | TGGAg | | | |
| Linker | GGCGGGcaattg | 1082 | ggql | 1083 |
| FRB_{L} | gaaatgTGGCATGAAGGGTTGGAAG | 1084 | EMVVHEGLEEASRLYFGERNVKG | 1085 |
| | AAGCTTCAAGGCTGTACTTCGGA | | MFEVLEPLHAMMERGPQTLKETS | |
| | GAGAGGAACGTGAAGGGCATGTT | | FNQAYGRDLMEAQEWCRKYMKS | |
| | TGAGGTTCTTGAACCTCTGCACG | | GNVKDLLQAVVDLYYHVFRRISK | |
| | CCATGATGGAACGGGGACCGCAG | | | |
| | ACACTGAAAGAAACCTCTTTTAAT | | | |
| | CAGGCCTACGGCAGAGACCTGAT | | | |
| | GGAGGCCCAAGAATGGTGTAGAA | | | |
| | AGTATATGAAATCCGGTAACGTGA | | | |
| | AAGACCTGcttCAGGCCTGGGACC | | | |
| | TTTATTACCATGTGTTCAGGCGGA | | | |
| | TCAGTAAG | | | |
| Linker | TCAGGCGGTGGCTCAGGTccatgg | 1086 | SGGGSGPW | 1087 |
| Δcaspase9 | GGATTTGGTGATGTCGGTGCTCT | 1088 | GFGDVGALESLRGNADLAYILSME | 1089 |
| | TGAGAGTTTGAGGGGAAATGCAG | | PCGHCLIINNVNFCRESGLRTRTG | |
| | ATTTGGCTTACATCCTGAGCATGG | | SNIDCEKLRRRFSSLHFMVEVKGD | |
| | AGCCCTGTGGCCACTGCCTCATT | | LTAKKMVLALLELARQDHGALDCC | |
| | ATCAACAATGTGAACTTCTGCCGT | | VVVILSHGCQASHLQFPGAVYGTD | |
| | GAGTCCGGGCTCCGCACCCGCA | | GCPVSVEKIVNIFNGTSCPSLGGK | |
| | CTGGCTCCAACATCGACTGTGAG | | PKLFFIQACGGEQKDHGFEVASTS | |
| | AAGTTGCGGCGTCGCTTCTCCTC | | PEDESPGSNPEPDATPFQEGLRT | |
| | GCTGCATTTCATGGTGGAGGTGA | | FDQLDAISSLPTPSDIFVSYSTFPG | |
| | AGGGCGACCTGACTGCCAAGAAA | | FVSWRDPKSGSVVYVETLDDIFEQ | |
| | ATGGTGCTGGCTTTGCTGGAGCT | | WAHSEDLQSLLLRVANAVSVKGIY | |
| | GGCGCgGCAGGACCACGGTGCTC | | KQMPGCFNFLRKKLFFKTSASRA | |
| | TGGACTGCTGCGTGGTGGTCATT | | | |
| | CTCTCTCACGGCTGTCAGGCCAG | | | |
| | CCACCTGCAGTTCCCAGGGGCTG | | | |
| | TCTACGGCACAGATGGATGCCCT | | | |
| | GTGTCGGTCGAGAAGATTGTGAA | | | |
| | CATCTTCAATGGGACCAGCTGCC | | | |
| | CCAGCCTGGGAGGGAAGCCCAA | | | |
| | GCTCTTTTTCATCCAGGCCTGTGG | | | |
| | TGGGGAGCAGAAAGAtCATGGGT | | | |
| | TTGAGGTGGCCTCCACTTCCCCT | | | |
| | GAAGACGAGTCCCCTGGCAGTAA | | | |
| | CCCCGAGCCAGATGCCACCCCGT | | | |
| | TCCAGGAAGGTTTGAGGACCTTC | | | |
| | GACCAGCTGGACGCCATATCTAG | | | |
| | TTTGCCCACACCCAGTGACATCTT | | | |
| | TGTGTCCTACTCTACTTTCCCAGG | | | |
| | TTTTGTTTCCTGGAGGGACCCCAA | | | |
| | GAGTGGCTCCTGGTACGTTGAGA | | | |
| | CCCTGGACGACATCTTTGAGCAG | | | |
| | TGGGCTCACTCTGAAGACCTGCA | | | |
| | GTCCCTCCTGCTTAGGGTCGCTA | | | |
| | ATGCTGTTTCGGTGAAAGGGATTT | | | |
| | ATAAACAGATGCCTGGTTGCTTTA | | | |
| | ATTTCCTCCGGAAAAAACTTTTCT | | | |
| | TTAAAACATCAGCTAGCAGAGCC | | | |
| Linker | ggatctggaccgcGG | 1090 | GSGPR | 1091 |
| T2A | GAAGGCCGAGGGAGCCTGCTGA | 1092 | EGRGSLLTCGDVEENPGP | 1093 |
| | CATGTGGCGATGTGGAGGAAAAC | | | |
| | CCAGGACCA | | | |
| Linker | CCATGG | 1094 | PW | 1095 |
| Signal | ATGGAGTTTGGACTTTCTTGGTTG | 1096 | MEFGLSVVLFLVAILKGVQCSR | 1097 |
| Peptide | TTTTTGGTGGCAATTCTGAAGGGT | | | |
| | GTCCAGTGTAGCAGG | | | |
| PSCA(A11) | GACATCCAACTGACGCAAAGCCC | 1098 | DIQLTQSPSTLSASMGDRVTITCSA | 1099 |
| VL | ATCTACACTCAGCGCTAGCATGG | | SSSVRFIHVVYQQKPGKAPKRLIYD | |
| | GGGACAGGGTCACAATCACGTGC | | TSKLASGVPSRFSGSGSGTDFTLT | |
| | TCTGCCTCAAGTTCCGTTAGGTTT | | ISSLQPEDFATYYCQQWGSSPFTF | |
| | ATCCATTGGTATCAGCAGAAACCT | | GQGTKVEIK | |
| | GGAAAGGCCCCAAAAAGACTGAT | | | |
| | CTATGATACCAGCAAGCTGGCTT | | | |
| | CCGGAGTGCCCTCAAGGTTCTCA | | | |
| | GGATCTGGCAGTGGGACCGATTT | | | |
| | CACCCTGACAATTAGCAGCCTTCA | | | |
| | GCCAGAGGATTTCGCAACCTATTA | | | |
| | CTGTCAGCAATGGGGGTCCAGCC | | | |
| | CATTCACTTTCGGCCAAGGAACAA | | | |
| | AGGTGGAGATAAAA | | | |
| Flex | GGCGGAGGAAGCGGAGGTGGGG | 1100 | gggsgggg | 1101 |
| | GC | | | |
| PSCA(A11) | GAGGTGCAGCTCGTGGAGTATGG | 1102 | EVQLVEYGGGLVQPGGSLRLSCA | 1103 |
| VH | CGGGGGCCTGGTGCAGCCTGGG | | ASGFNIKDYYIHVVVRQAPGKGLE | |
| | GGTAGTCTGAGGCTCTCCTGCGC | | VVVAWIDPENGDTEFVPKFQGRAT | |
| | TGCCTCTGGCTTTAACATTAAAGA | | MSADTSKNTAYLQMNSLRAEDTA | |
| | CTACTACATACATTGGGTGCGGC | | VYYCKTGGFWGQGTLVTVSS | |
| | AGGCCCCAGGCAAAGGGCTCGAA | | | |
| | TGGGTGGCCTGGATTGACCCTGA | | | |
| | GAATGGTGACACTGAGTTTGTCC | | | |
| | CCAAGTTTCAGGGCAGAGCCACC | | | |
| | ATGAGCGCTGACACAAGCAAAAA | | | |
| | CACTGCTTATCTCCAAATGAATAG | | | |
| | CCTGCGAGCTGAAGATACAGCAG | | | |
| | TCTATTACTGCAAGACGGGAGGA | | | |
| | TTCTGGGGCCAGGGAACTCTGGT | | | |
| | GACAGTTAGTTCC | | | |
| Linker | GGATCC | 1104 | gs | 1105 |
| CD34 | GAACTTCCTACTCAGGGGACTTTC | 1106 | ELPTQGTFSNVSTNVS | 1107 |
| epitope | TCAAACGTTAGCACAAACGTAAGT | | | |
| CD8 stalk | CCCGCCCCAAGACCCCCCACACC | 1108 | PAPRPPTPAPTIASQPLSLRPEAC | 1109 |
| | TGCGCCGACCATTGCTTCTCAAC | | RPAAGGAVHTRGLDFACD | |
| | CCCTGAGTTTGAGACCCGAGGCC | | | |
| | TGCCGGCCAGCTGCCGGCGGGG | | | |
| | CCGTGCATACAAGAGGACTCGAT | | | |
| | TTCGCTTGCGAC | | | |
| CD8 | ATCTATATCTGGGCACCTCTCGCT | 1110 | IYIWAPLAGTCGVLLLSLVITLYCNH | 1111 |
| trans- | GGCACCTGTGGAGTCCTTCTGCT | | RNRRRVCKCPR | |
| membrane | CAGCCTGGTTATTACTCTGTACTG | | | |
| | TAATCACCGGAATCGCCGCCGCG | | | |
| | TTTGTAAGTGTCCCAGG | | | |
| Linker | GTCGAC | 1112 | VD | 1113 |
| CD3ζ | AGAGTGAAGTTCAGCAGGAGCGC | 1114 | RVKFSRSADAPAYQQGQNQLYNE | 1115 |
| | AGACGCCCCCGCGTACCAGCAG | | LNLGRREEYDVLDKRRGRDPEMG | |
| | GGCCAGAACCAGCTCTATAACGA | | GKPRRKNPQEGLYNELQKDKMAE | |
| | GCTCAATCTAGGACGAAGAGAGG | | AYSEIGMKGERRRGKGHDGLYQG | |
| | AGTACGATGTTTTGGACAAGAGA | | LSTATKDTYDALHMQALPPR | |
| | CGTGGCCGGGACCCTGAGATGG | | | |
| | GGGGAAAGCCGAGAAGGAAGAA | | | |
| | CCCTCAGGAAGGCCTGTACAATG | | | |
| | AACTGCAGAAAGATAAGATGGCG | | | |
| | GAGGCCTACAGTGAGATTGGGAT | | | |
| | GAAAGGCGAGCGCCGGAGGGGC | | | |
| | AAGGGGCACGATGGCCTTTACCA | | | |
| | GGGTCTCAGTACAGCCACCAAGG | | | |
| | ACACCTACGACGCCCTTCACATG | | | |
| | CAAGCTCTTCCACCTCGT | | | |
| Linker | gGAACGCGTGGATCGGGA | 1116 | GTRGSG | 1117 |
| P2A | GCTACTAACTTCAGCCTGCTGAA | 1118 | ATNFSLLKQAGDVEENPGP | 1119 |
| | GCAGGCTGGAGACGTGGAGGAG | | | |
| | AACcccgggcct | | | |
| MyD88 | atggctgcaggaggtcccggcgcggggtctgcg | 1120 | MAAGGPGAGSAAPVSSTSSLPLA | 1121 |
| | gccccggtctcctccacatcctcccttcccctggct | | ALNMRVRRRLSLFLNVRTQVAAD | |
| | gctctcaacatgcgagtgcggcgccgcctgtctct | | WTALAEEMDFEYLEIRQLETQADP | |
| | gttcttgaacgtgcggacacaggtggcggccga | | TGRLLDAWQGRPGASVGRLLDLL | |
| | ctggaccgcgctggcggaggagatggactttga | | TKLGRDDVLLELGPSIEEDCQKYIL | |
| | gtacttggagatccggcaactggagacacaagc | | KQQQEEAEKPLQVAAVDSSVPRT | |
| | ggaccccactggcaggctgctggacgcctggc | | AELAGITTLDDPLGHMPERFDAFIC | |
| | agggacgccctggcgcctctgtaggccgactgc | | YCPSDI | |
| | tcgatctgcttaccaagctgggccgcgacgacgt | | | |
| | gctgctggagctgggacccagcattgaggagg | | | |
| | attgccaaaagtatatcttgaagcagcagcagg | | | |
| | aggaggctgagaagcctttacaggtggccgctg | | | |
| | tagacagcagtgtcccacggacagcagagctg | | | |
| | gcgggcatcaccacacttgatgaccccctgggg | | | |
| | catatgcctgagcgtttcgatgccttcatctgctatt | | | |
| | gccccagcgacatc | | | |
| Linker | gtcgag | 1122 | VE | 1123 |
| CD40 | aaaaaggtggccaagaagccaaccaataagg | 1124 | KKVAKKPTNKAPHPKQEPQEINFP | 1125 |
| | ccccccaccccaagcaggagccccaggagat | | DDLPGSNTAAPVQETLHGCQPVT | |
| | caattttcccgacgatcttcctggctccaacactgc | | QEDGKESRISVQERQ | |
| | tgctccagtgcaggagactttacatggatgccaa | | | |
| | ccggtcacccaggaggatggcaaagagagtcg | | | |
| | catctcagtgcaggagagacag | | | |
| Linker | gtcgag | 1126 | VE | 1127 |
| FKBP_{V}_{^{′}} | GGcGTcCAaGTcGAaACcATtagtCCc | 1128 | GVQVETISPGDGRTFPKRGQTCV | 1129 |
| | GGcGAtGGcaGaACaTTtCCtAAaaG | | VHYTGMLEDGKKVDSSRDRNKPF | |
| | gGGaCAaACaTGtGTcGTcCAtTAtA | | KFMLGKQEVIRGVVEEGVAQMSVG | |
| | CaGGcATGtTgGAgGAcGGcAAaAA | | QRAKLTISPDYAYGATGHPGIIPPH | |
| | gGTgGAcagtagtaGaGAtcGcAAtAAa | | ATLVFDVELLKLE | |
| | CCtTTcAAaTTcATGtTgGGaAAaCAa | | | |
| | GAaGTcATtaGgGGaTGGGAgGAgG | | | |
| | GcGTgGCtCAaATGtccGTcGGcCAa | | | |
| | cGcGCtAAgCTcACcATcagcCCcGAc | | | |
| | TAcGCaTAcGGcGCtACcGGaCAtCC | | | |
| | cGGaATtATtCCcCCtCAcGCtACctTg | | | |
| | GTgTTtGAcGTcGAaCTgtTgAAgCTc | | | |
| | GAa | | | |
| Linker | gtcgag | 1130 | VE | 1131 |
| FKBP_{V} | ggagtgcaggtggagactatctccccaggagac | 1132 | GVQVETISPGDGRTFPKRGQTCV | 1133 |
| | gggcgcaccttccccaagcgcggccagacctg | | VHYTGMLEDGKKVDSSRDRNKPF | |
| | cgtggtgcactacaccgggatgcttgaagatgg | | KFMLGKQEVIRGVVEEGVAQMSVG | |
| | aaagaaagttgattcctcccgggacagaaaca | | QRAKLTISPDYAYGATGHPGIIPPH | |
| | agccctttaagtttatgctaggcaagcaggaggt | | ATLVFDVELLKLE | |
| | gatccgaggctgggaagaaggggttgcccaga | | | |
| | tgagtgtgggtcagagagccaaactgactatatc | | | |
| | tccagattatgcctatggtgccactgggcaccca | | | |
| | ggcatcatcccaccacatgccactctcgtcttcga | | | |
| | tgtggagcttctaaaactggaa | | | |
| STOP | TGA | 1134 | stop | |

Appendix 6: pBP1317-pSFG-FKBP.FRB.ΔC9_{Q}. T2A-αPSCA.Q.CD8stm.ζ.P2A-iMC

| | | SEQ | | SEQ |
|---|---|---|---|---|
| | | ID | | ID |
| Fragment | Nucleotide | NO: | Peptide | NO: |
| Leader | ATGCtcgagcaattg | 1135 | MLEQL | 1136 |
| peptide | | | | |
| FKBP″ wt | GGcGTGCAaGTGGAaACTATaAGC | 1137 | GVQVETISPGDGRTFPKRGQTCV | 1138 |
| | CCgGGAGAcGGCcGcACATTtCCC | | VHYTGMLEDGKKFDSSRDRNKPF | |
| | AAgAGAGGcCAGACcTGCGTgGTG | | KFMLGKQEVIRGVVEEGVAQMSVG | |
| | CAcTATACaGGAATGCTGGAgGAC | | QRAKLTISPDYAYGATGHPGIIPPH | |
| | GGgAAGAAaTTCGAtAGCtcCCGGG | | ATLVFDVELLKLE | |
| | AtCGAAAtAAGCCtTTCAAaTTCATG | | | |
| | CTGGGcAAGCAaGAAGTcATCaGa | | | |
| | GGCTGGGAaGAAGGcGTCGCcCA | | | |
| | GATGTCcGTGGGtCAGcGcGCCAA | | | |
| | gCTGACaATTAGtCCAGAtTACGCc | | | |
| | TATGGcGCAACaGGCCAtCCCGGc | | | |
| | ATCATcCCCCCaCATGCcACACTc | | | |
| | GTCTTtGATGTcGAGCTcCTGAAaC | | | |
| | TGGAg | | | |
| Linker | GGCGGGcaattg | 1139 | ggql | 1140 |
| FRB | gaaatgTGGCATGAAGGGTTGGAAG | 1141 | EMVVHEGLEEASRLYFGERNVKG | 1142 |
| | AAGCTTCAAGGCTGTACTTCGGA | | MFEVLEPLHAMMERGPQTLKETS | |
| | GAGAGGAACGTGAAGGGCATGTT | | FNQAYGRDLMEAQEWCRKYMKS | |
| | TGAGGTTCTTGAACCTCTGCACG | | GNVKDLTQAVVDLYYHVFRRISK | |
| | CCATGATGGAACGGGGACCGCAG | | | |
| | ACACTGAAAGAAACCTCTTTTAAT | | | |
| | CAGGCCTACGGCAGAGACCTGAT | | | |
| | GGAGGCCCAAGAATGGTGTAGAA | | | |
| | AGTATATGAAATCCGGTAACGTGA | | | |
| | AAGACCTGactCAGGCCTGGGACC | | | |
| | TTTATTACCATGTGTTCAGGCGGA | | | |
| | TCAGTAAG | | | |
| Linker | TCAGGCGGTGGCTCAGGTccatgg | 1143 | SGGGSGPW | 1144 |
| Δcaspase- | GGATTTGGTGATGTCGGTGCTCT | 1145 | GFGDVGALESLRGNADLAYILSME | 1146 |
| 9_{Q}(N405Q) | TGAGAGTTTGAGGGGAAATGCAG | | PCGHCLIINNVNFCRESGLRTRTG | |
| | ATTTGGCTTACATCCTGAGCATGG | | SNIDCEKLRRRFSSLHFMVEVKGD | |
| | AGCCCTGTGGCCACTGCCTCATT | | LTAKKMVLALLELARQDHGALDCC | |
| | ATCAACAATGTGAACTTCTGCCGT | | VVVILSHGCQASHLQFPGAVYGTD | |
| | GAGTCCGGGCTCCGCACCCGCA | | GCPVSVEKIVNIFNGTSCPSLGGK | |
| | CTGGCTCCAACATCGACTGTGAG | | PKLFFIQACGGEQKDHGFEVASTS | |
| | AAGTTGCGGCGTCGCTTCTCCTC | | PEDESPGSNPEPDATPFQEGLRT | |
| | GCTGCATTTCATGGTGGAGGTGA | | FDQLDAISSLPTPSDIFVSYSTFPG | |
| | AGGGCGACCTGACTGCCAAGAAA | | FVSWRDPKSGSVVYVETLDDIFEQ | |
| | ATGGTGCTGGCTTTGCTGGAGCT | | WAHSEDLQSLLLRVANAVSVKGIY | |
| | GGCGCgGCAGGACCACGGTGCTC | | KQMPGCFQFLRKKLFFKTSASRA | |
| | TGGACTGCTGCGTGGTGGTCATT | | | |
| | CTCTCTCACGGCTGTCAGGCCAG | | | |
| | CCACCTGCAGTTCCCAGGGGCTG | | | |
| | TCTACGGCACAGATGGATGCCCT | | | |
| | GTGTCGGTCGAGAAGATTGTGAA | | | |
| | CATCTTCAATGGGACCAGCTGCC | | | |
| | CCAGCCTGGGAGGGAAGCCCAA | | | |
| | GCTCTTTTTCATCCAGGCCTGTGG | | | |
| | TGGGGAGCAGAAAGAtCATGGGT | | | |
| | TTGAGGTGGCCTCCACTTCCCCT | | | |
| | GAAGACGAGTCCCCTGGCAGTAA | | | |
| | CCCCGAGCCAGATGCCACCCCGT | | | |
| | TCCAGGAAGGTTTGAGGACCTTC | | | |
| | GACCAGCTGGACGCCATATCTAG | | | |
| | TTTGCCCACACCCAGTGACATCTT | | | |
| | TGTGTCCTACTCTACTTTCCCAGG | | | |
| | TTTTGTTTCCTGGAGGGACCCCAA | | | |
| | GAGTGGCTCCTGGTACGTTGAGA | | | |
| | CCCTGGACGACATCTTTGAGCAG | | | |
| | TGGGCTCACTCTGAAGACCTGCA | | | |
| | GTCCCTCCTGCTTAGGGTCGCTA | | | |
| | ATGCTGTTTCGGTGAAAGGGATTT | | | |
| | ATAAACAGATGCCTGGTTGCTTTc | | | |
| | AaTTCCTCCGGAAAAAACTTTTCT | | | |
| | TTAAAACATCAGCTAGCAGAGCC | | | |
| Linker | ggatctggaccgcGG | 1147 | GSGPR | 1148 |
| T2A | GAAGGCCGAGGGAGCCTGCTGA | 1149 | EGRGSLLTCGDVEENPGP | 1150 |
| | CATGTGGCGATGTGGAGGAAAAC | | | |
| | CCAGGACCA | | | |
| Linker | CCATGG | 1151 | PW | 1152 |
| Signal | ATGGAGTTTGGACTTTCTTGGTTG | 1153 | MEFGLSVVLFLVAILKGVQCSR | 1154 |
| Peptide | TTTTTGGTGGCAATTCTGAAGGGT | | | |
| | GTCCAGTGTAGCAGG | | | |
| PSCA(A11) | GACATCCAACTGACGCAAAGCCC | 1155 | DIQLTQSPSTLSASMGDRVTITCSA | 1156 |
| VL | ATCTACACTCAGCGCTAGCATGG | | SSSVRFIHVVYQQKPGKAPKRLIYD | |
| | GGGACAGGGTCACAATCACGTGC | | TSKLASGVPSRFSGSGSGTDFTLT | |
| | TCTGCCTCAAGTTCCGTTAGGTTT | | ISSLQPEDFATYYCQQWGSSPFTF | |
| | ATCCATTGGTATCAGCAGAAACCT | | GQGTKVEIK | |
| | GGAAAGGCCCCAAAAAGACTGAT | | | |
| | CTATGATACCAGCAAGCTGGCTT | | | |
| | CCGGAGTGCCCTCAAGGTTCTCA | | | |
| | GGATCTGGCAGTGGGACCGATTT | | | |
| | CACCCTGACAATTAGCAGCCTTCA | | | |
| | GCCAGAGGATTTCGCAACCTATTA | | | |
| | CTGTCAGCAATGGGGGTCCAGCC | | | |
| | CATTCACTTTCGGCCAAGGAACAA | | | |
| | AGGTGGAGATAAAA | | | |
| Flex | GGCGGAGGAAGCGGAGGTGGGG | 1157 | gggsgggg | 1158 |
| | GC | | | |
| PSCA(A11) | GAGGTGCAGCTCGTGGAGTATGG | 1159 | EVQLVEYGGGLVQPGGSLRLSCA | 1160 |
| VH | CGGGGGCCTGGTGCAGCCTGGG | | ASGFNIKDYYIHVVVRQAPGKGLE | |
| | GGTAGTCTGAGGCTCTCCTGCGC | | VVVAWIDPENGDTEFVPKFQGRAT | |
| | TGCCTCTGGCTTTAACATTAAAGA | | MSADTSKNTAYLQMNSLRAEDTA | |
| | CTACTACATACATTGGGTGCGGC | | VYYCKTGGFWGQGTLVTVSS | |
| | AGGCCCCAGGCAAAGGGCTCGAA | | | |
| | TGGGTGGCCTGGATTGACCCTGA | | | |
| | GAATGGTGACACTGAGTTTGTCC | | | |
| | CCAAGTTTCAGGGCAGAGCCACC | | | |
| | ATGAGCGCTGACACAAGCAAAAA | | | |
| | CACTGCTTATCTCCAAATGAATAG | | | |
| | CCTGCGAGCTGAAGATACAGCAG | | | |
| | TCTATTACTGCAAGACGGGAGGA | | | |
| | TTCTGGGGCCAGGGAACTCTGGT | | | |
| | GACAGTTAGTTCC | | | |
| Linker | GGATCC | 1161 | gs | 1162 |
| CD34 | GAACTTCCTACTCAGGGGACTTTC | 1163 | ELPTQGTFSNVSTNVS | 1164 |
| epitope | TCAAACGTTAGCACAAACGTAAGT | | | |
| CD8 stalk | CCCGCCCCAAGACCCCCCACACC | 1165 | PAPRPPTPAPTIASQPLSLRPEAC | 1166 |
| | TGCGCCGACCATTGCTTCTCAAC | | RPAAGGAVHTRGLDFACD | |
| | CCCTGAGTTTGAGACCCGAGGCC | | | |
| | TGCCGGCCAGCTGCCGGCGGGG | | | |
| | CCGTGCATACAAGAGGACTCGAT | | | |
| | TTCGCTTGCGAC | | | |
| CD8 | ATCTATATCTGGGCACCTCTCGCT | 1167 | IYIWAPLAGTCGVLLLSLVITLYCNH | 1168 |
| trans- | GGCACCTGTGGAGTCCTTCTGCT | | RNRRRVCKCPR | |
| membrane | CAGCCTGGTTATTACTCTGTACTG | | | |
| | TAATCACCGGAATCGCCGCCGCG | | | |
| | TTTGTAAGTGTCCCAGG | | | |
| Linker | GTCGAC | 1169 | VD | 1170 |
| CD3ζ | AGAGTGAAGTTCAGCAGGAGCGC | 1171 | RVKFSRSADAPAYQQGQNQLYNE | 1172 |
| | AGACGCCCCCGCGTACCAGCAG | | LNLGRREEYDVLDKRRGRDPEMG | |
| | GGCCAGAACCAGCTCTATAACGA | | GKPRRKNPQEGLYNELQKDKMAE | |
| | GCTCAATCTAGGACGAAGAGAGG | | AYSEIGMKGERRRGKGHDGLYQG | |
| | AGTACGATGTTTTGGACAAGAGA | | LSTATKDTYDALHMQALPPR | |
| | CGTGGCCGGGACCCTGAGATGG | | | |
| | GGGGAAAGCCGAGAAGGAAGAA | | | |
| | CCCTCAGGAAGGCCTGTACAATG | | | |
| | AACTGCAGAAAGATAAGATGGCG | | | |
| | GAGGCCTACAGTGAGATTGGGAT | | | |
| | GAAAGGCGAGCGCCGGAGGGGC | | | |
| | AAGGGGCACGATGGCCTTTACCA | | | |
| | GGGTCTCAGTACAGCCACCAAGG | | | |
| | ACACCTACGACGCCCTTCACATG | | | |
| | CAAGCTCTTCCACCTCGT | | | |
| Linker | gGAACGCGTGGATCGGGA | 1173 | GTRGSG | 1174 |
| P2A | GCTACTAACTTCAGCCTGCTGAA | 1175 | ATNFSLLKQAGDVEENPGP | 1176 |
| | GCAGGCTGGAGACGTGGAGGAG | | | |
| | AACcccgggcct | | | |
| MyD88 | atggctgcaggaggtcccggcgcggggtctgcg | 1177 | MAAGGPGAGSAAPVSSTSSLPLA | 1178 |
| | gccccggtctcctccacatcctcccttcccctggct | | ALNMRVRRRLSLFLNVRTQVAAD | |
| | gctctcaacatgcgagtgcggcgccgcctgtctct | | WTALAEEMDFEYLEIRQLETQADP | |
| | gttcttgaacgtgcggacacaggtggcggccga | | TGRLLDAWQGRPGASVGRLLDLL | |
| | ctggaccgcgctggcggaggagatggactttga | | TKLGRDDVLLELGPSIEEDCQKYIL | |
| | gtacttggagatccggcaactggagacacaagc | | KQQQEEAEKPLQVAAVDSSVPRT | |
| | ggaccccactggcaggctgctggacgcctggc | | AELAGITTLDDPLGHMPERFDAFIC | |
| | agggacgccctggcgcctctgtaggccgactgc | | YCPSDI | |
| | tcgatctgcttaccaagctgggccgcgacgacgt | | | |
| | gctgctggagctgggacccagcattgaggagg | | | |
| | attgccaaaagtatatcttgaagcagcagcagg | | | |
| | aggaggctgagaagcctttacaggtggccgctg | | | |
| | tagacagcagtgtcccacggacagcagagctg | | | |
| | gcgggcatcaccacacttgatgaccccctgggg | | | |
| | catatgcctgagcgtttcgatgccttcatctgcta | | | |
| | ttgccccagcgacatc | | | |
| Linker | gtcgag | 1179 | VE | 1180 |
| CD40 | aaaaaggtggccaagaagccaaccaataagg | 1181 | KKVAKKPTNKAPHPKQEPQEINFP | 1182 |
| | ccccccaccccaagcaggagccccaggagat | | DDLPGSNTAAPVQETLHGCQPVT | |
| | caattttcccgacgatcttcctggctccaacactgc | | QEDGKESRISVQERQ | |
| | tgctccagtgcaggagactttacatggatgccaa | | | |
| | ccggtcacccaggaggatggcaaagagagtcg | | | |
| | catctcagtgcaggagagacag | | | |
| Linker | gtcgag | 1183 | VE | 1184 |
| FKBP_{V}′ | GGcGTcCAaGTcGAaACcATtagtCCc | 1185 | GVQVETISPGDGRTFPKRGQTCV | 1186 |
| | GGcGAtGGcaGaACaTTtCCtAAaaG | | VHYTGMLEDGKKVDSSRDRNKPF | |
| | gGGaCAaACaTGtGTcGTcCAtTAtA | | KFMLGKQEVIRGVVEEGVAQMSVG | |
| | CaGGcATGtTgGAgGAcGGcAAaAA | | QRAKLTISPDYAYGATGHPGIIPPH | |
| | gGTgGAcagtagtaGaGAtcGcAAtAAa | | ATLVFDVELLKLE | |
| | CCtTTcAAaTTcATGtTgGGaAAaCAa | | | |
| | GAaGTcATtaGgGGaTGGGAgGAgG | | | |
| | GcGTgGCtCAaATGtccGTcGGcCAa | | | |
| | cGcGCtAAgCTcACcATcagcCCcGAc | | | |
| | TAcGCaTAcGGcGCtACcGGaCAtCC | | | |
| | cGGaATtATtCCcCCtCAcGCtACctTg | | | |
| | GTgTTtGAcGTcGAaCTgtTgAAgCTc | | | |
| | GAa | | | |
| Linker | gtcgag | 1187 | VE | 1188 |
| FKBP_{V} | ggagtgcaggtggagactatctccccaggagac | 1189 | GVQVETISPGDGRTFPKRGQTCV | 1190 |
| | gggcgcaccttccccaagcgcggccagacctg | | VHYTGMLEDGKKVDSSRDRNKPF | |
| | cgtggtgcactacaccgggatgcttgaagatgg | | KFMLGKQEVIRGVVEEGVAQMSVG | |
| | aaagaaagttgattcctcccgggacagaaaca | | QRAKLTISPDYAYGATGHPGIIPPH | |
| | agccctttaagtttatgctaggcaagcaggaggt | | ATLVFDVELLKLE | |
| | gatccgaggctgggaagaaggggttgcccaga | | | |
| | tgagtgtgggtcagagagccaaactgactatatc | | | |
| | tccagattatgcctatggtgccactgggcaccca | | | |
| | ggcatcatcccaccacatgccactctcgtcttcga | | | |
| | tgtggagcttctaaaactggaa | | | |
| STOP | TGA | 1191 | stop | |

Appendix 7: pBP1319-pSFG-FKBP.FRB.ΔC9.T2A-αPSCA.Q.CD8stm.ζ.P2A-MC.FKBPᵥ

| | | SEQ | | SEQ |
|---|---|---|---|---|
| | | ID | | ID |
| Fragment | Nucleotide | NO: | Peptide | NO: |
| Leader | ATGCtcgagcaattg | 1192 | MLEQL | 1193 |
| peptide | | | | |
| FKBP″ wt | GGcGTGCAaGTGGAaACTATaAGC | 1194 | GVQVETISPGDGRTFPKRGQTCV | 1195 |
| | CCgGGAGAcGGCcGcACATTtCCC | | VHYTGMLEDGKKFDSSRDRNKP | |
| | AAgAGAGGcCAGACcTGCGTgGTG | | FKFMLGKQEVIRGWEEGVAQMS | |
| | CAcTATACaGGAATGCTGGAgGAC | | VGQRAKLTISPDYAYGATGHPGII | |
| | GGgAAGAAaTTCGAtAGCtcCCGGG | | PPHATLVFDVELLKLE | |
| | AtCGAAAtAAGCCtTTCAAaTTCATG | | | |
| | CTGGGcAAGCAaGAAGTcATCaGa | | | |
| | GGCTGGGAaGAAGGcGTCGCcCA | | | |
| | GATGTCcGTGGGtCAGcGcGCCAA | | | |
| | gCTGACaATTAGtCCAGAtTACGCc | | | |
| | TATGGcGCAACaGGCCAtCCCGGc | | | |
| | ATCATcCCCCCaCATGCcACACTc | | | |
| | GTCTTtGATGTcGAGCTcCTGAAaC | | | |
| | TGGAg | | | |
| Linker | GGCGGGcaattg | 1196 | ggql | 1197 |
| FRB | gaaatgTGGCATGAAGGGTTGGAAG | 1198 | EMWHEGLEEASRLYFGERNVKG | 1199 |
| | AAGCTTCAAGGCTGTACTTCGGA | | MFEVLEPLHAMMERGPQTLKETS | |
| | GAGAGGAACGTGAAGGGCATGTT | | FNQAYGRDLMEAQEWCRKYMK | |
| | TGAGGTTCTTGAACCTCTGCACG | | SGNVKDLTQAVVDLYYHVFRRISK | |
| | CCATGATGGAACGGGGACCGCAG | | | |
| | ACACTGAAAGAAACCTCTTTTAAT | | | |
| | CAGGCCTACGGCAGAGACCTGAT | | | |
| | GGAGGCCCAAGAATGGTGTAGAA | | | |
| | AGTATATGAAATCCGGTAACGTGA | | | |
| | AAGACCTGactCAGGCCTGGGACC | | | |
| | TTTATTACCATGTGTTCAGGCGGA | | | |
| | TCAGTAAG | | | |
| Linker | TCAGGCGGTGGCTCAGGTccatgg | 1200 | SGGGSGPW | 1201 |
| Δcaspase- | GGATTTGGTGATGTCGGTGCTCT | 1202 | GFGDVGALESLRGNADLAYILSM | 1203 |
| 9_{Q} | TGAGAGTTTGAGGGGAAATGCAG | | EPCGHCLIINNVNFCRESGLRTRT | |
| | ATTTGGCTTACATCCTGAGCATGG | | GSNIDCEKLRRRFSSLHFMVEVK | |
| | AGCCCTGTGGCCACTGCCTCATT | | GDLTAKKMVLALLELARQDHGAL | |
| | ATCAACAATGTGAACTTCTGCCGT | | DCCVVVILSHGCQASHLQFPGAV | |
| | GAGTCCGGGCTCCGCACCCGCA | | YGTDGCPVSVEKIVNIFNGTSCPS | |
| | CTGGCTCCAACATCGACTGTGAG | | LGGKPKLFFIQACGGEQKDHGFE | |
| | AAGTTGCGGCGTCGCTTCTCCTC | | VASTSPEDESPGSNPEPDATPFQ | |
| | GCTGCATTTCATGGTGGAGGTGA | | EGLRTFDQLDAISSLPTPSDIFVS | |
| | AGGGCGACCTGACTGCCAAGAAA | | YSTFPGFVSVVRDPKSGSVVYVET | |
| | ATGGTGCTGGCTTTGCTGGAGCT | | LDDIFEQWAHSEDLQSLLLRVAN | |
| | GGCGCgGCAGGACCACGGTGCTC | | AVSVKGIYKQMPGCFQFLRKKLF | |
| | TGGACTGCTGCGTGGTGGTCATT | | FKTSASRA | |
| | CTCTCTCACGGCTGTCAGGCCAG | | | |
| | CCACCTGCAGTTCCCAGGGGCTG | | | |
| | TCTACGGCACAGATGGATGCCCT | | | |
| | GTGTCGGTCGAGAAGATTGTGAA | | | |
| | CATCTTCAATGGGACCAGCTGCC | | | |
| | CCAGCCTGGGAGGGAAGCCCAA | | | |
| | GCTCTTTTTCATCCAGGCCTGTGG | | | |
| | TGGGGAGCAGAAAGAtCATGGGT | | | |
| | TTGAGGTGGCCTCCACTTCCCCT | | | |
| | GAAGACGAGTCCCCTGGCAGTAA | | | |
| | CCCCGAGCCAGATGCCACCCCGT | | | |
| | TCCAGGAAGGTTTGAGGACCTTC | | | |
| | GACCAGCTGGACGCCATATCTAG | | | |
| | TTTGCCCACACCCAGTGACATCTT | | | |
| | TGTGTCCTACTCTACTTTCCCAGG | | | |
| | TTTTGTTTCCTGGAGGGACCCCAA | | | |
| | GAGTGGCTCCTGGTACGTTGAGA | | | |
| | CCCTGGACGACATCTTTGAGCAG | | | |
| | TGGGCTCACTCTGAAGACCTGCA | | | |
| | GTCCCTCCTGCTTAGGGTCGCTA | | | |
| | ATGCTGTTTCGGTGAAAGGGATTT | | | |
| | ATAAACAGATGCCTGGTTGCTTTc | | | |
| | AaTTCCTCCGGAAAAAACTTTTCT | | | |
| | TTAAAACATCAGCTAGCAGAGCC | | | |
| Linker | ggatctggaccgcGG | 1204 | GSGPR | 1205 |
| T2A | GAAGGCCGAGGGAGCCTGCTGA | 1206 | EGRGSLLTCGDVEENPGP | 1207 |
| | CATGTGGCGATGTGGAGGAAAAC | | | |
| | CCAGGACCA | | | |
| Linker | CCATGG | 1208 | PW | 1209 |
| Signal | ATGGAGTTTGGACTTTCTTGGTTG | 1210 | MEFGLSVVLFLVAILKGVQCSR | 1211 |
| Peptide | TTTTTGGTGGCAATTCTGAAGGGT | | | |
| | GTCCAGTGTAGCAGG | | | |
| PSCA(A11) | GACATCCAACTGACGCAAAGCCC | 1212 | DIQLTQSPSTLSASMGDRVTITCS | 1213 |
| VL | ATCTACACTCAGCGCTAGCATGG | | ASSSVRFIHVVYQQKPGKAPKRLI | |
| | GGGACAGGGTCACAATCACGTGC | | YDTSKLASGVPSRFSGSGSGTDF | |
| | TCTGCCTCAAGTTCCGTTAGGTTT | | TLTISSLQPEDFATYYCQQWGSS | |
| | ATCCATTGGTATCAGCAGAAACCT | | PFTFGQGTKVEIK | |
| | GGAAAGGCCCCAAAAAGACTGAT | | | |
| | CTATGATACCAGCAAGCTGGCTT | | | |
| | CCGGAGTGCCCTCAAGGTTCTCA | | | |
| | GGATCTGGCAGTGGGACCGATTT | | | |
| | CACCCTGACAATTAGCAGCCTTCA | | | |
| | GCCAGAGGATTTCGCAACCTATTA | | | |
| | CTGTCAGCAATGGGGGTCCAGCC | | | |
| | CATTCACTTTCGGCCAAGGAACAA | | | |
| | AGGTGGAGATAAAA | | | |
| Flex | GGCGGAGGAAGCGGAGGTGGGG | 1214 | gggsgggg | 1215 |
| | GC | | | |
| PSCA(A11) | GAGGTGCAGCTCGTGGAGTATGG | 1216 | EVQLVEYGGGLVQPGGSLRLSC | 1217 |
| VH | CGGGGGCCTGGTGCAGCCTGGG | | AASGFNIKDYYIHVVVRQAPGKGL | |
| | GGTAGTCTGAGGCTCTCCTGCGC | | EVVVAWIDPENGDTEFVPKFQGR | |
| | TGCCTCTGGCTTTAACATTAAAGA | | ATMSADTSKNTAYLQMNSLRAED | |
| | CTACTACATACATTGGGTGCGGC | | TAVYYCKTGGFWGQGTLVTVSS | |
| | AGGCCCCAGGCAAAGGGCTCGAA | | | |
| | TGGGTGGCCTGGATTGACCCTGA | | | |
| | GAATGGTGACACTGAGTTTGTCC | | | |
| | CCAAGTTTCAGGGCAGAGCCACC | | | |
| | ATGAGCGCTGACACAAGCAAAAA | | | |
| | CACTGCTTATCTCCAAATGAATAG | | | |
| | CCTGCGAGCTGAAGATACAGCAG | | | |
| | TCTATTACTGCAAGACGGGAGGA | | | |
| | TTCTGGGGCCAGGGAACTCTGGT | | | |
| | GACAGTTAGTTCC | | | |
| Linker | GGATCC | 1218 | gs | 1219 |
| CD34 | GAACTTCCTACTCAGGGGACTTTC | 1220 | ELPTQGTFSNVSTNVS | 1221 |
| epitope | TCAAACGTTAGCACAAACGTAAGT | | | |
| CD8 stalk | CCCGCCCCAAGACCCCCCACACC | 1222 | PAPRPPTPAPTIASQPLSLRPEAC | 1223 |
| | TGCGCCGACCATTGCTTCTCAAC | | RPAAGGAVHTRGLDFACD | |
| | CCCTGAGTTTGAGACCCGAGGCC | | | |
| | TGCCGGCCAGCTGCCGGCGGGG | | | |
| | CCGTGCATACAAGAGGACTCGAT | | | |
| | TTCGCTTGCGAC | | | |
| CD8 | ATCTATATCTGGGCACCTCTCGCT | 1224 | IYIWAPLAGTCGVLLLSLVITLYCN | 1225 |
| trans- | GGCACCTGTGGAGTCCTTCTGCT | | HRNRRRVCKCPR | |
| membrane | CAGCCTGGTTATTACTCTGTACTG | | | |
| | TAATCACCGGAATCGCCGCCGCG | | | |
| | TTTGTAAGTGTCCCAGG | | | |
| Linker | GTCGAC | 1226 | VD | 1227 |
| CD3ζ | AGAGTGAAGTTCAGCAGGAGCGC | 1228 | RVKFSRSADAPAYQQGQNQLYN | 1229 |
| | AGACGCCCCCGCGTACCAGCAG | | ELNLGRREEYDVLDKRRGRDPE | |
| | GGCCAGAACCAGCTCTATAACGA | | MGGKPRRKNPQEGLYNELQKDK | |
| | GCTCAATCTAGGACGAAGAGAGG | | MAEAYSEIGMKGERRRGKGHDG | |
| | AGTACGATGTTTTGGACAAGAGA | | LYQGLSTATKDTYDALHMQALPP | |
| | CGTGGCCGGGACCCTGAGATGG | | R | |
| | GGGGAAAGCCGAGAAGGAAGAA | | | |
| | CCCTCAGGAAGGCCTGTACAATG | | | |
| | AACTGCAGAAAGATAAGATGGCG | | | |
| | GAGGCCTACAGTGAGATTGGGAT | | | |
| | GAAAGGCGAGCGCCGGAGGGGC | | | |
| | AAGGGGCACGATGGCCTTTACCA | | | |
| | GGGTCTCAGTACAGCCACCAAGG | | | |
| | ACACCTACGACGCCCTTCACATG | | | |
| | CAAGCTCTTCCACCTCGT | | | |
| Linker | gGAACGCGTGGATCGGGA | 1230 | GTRGSG | 1231 |
| P2A | GCTACTAACTTCAGCCTGCTGAA | 1232 | ATNFSLLKQAGDVEENPGP | 1233 |
| | GCAGGCTGGAGACGTGGAGGAG | | | |
| | AACcccgggcct | | | |
| MyD88 | atggctgcaggaggtcccggcgcggggtctgcg | 1234 | MAAGGPGAGSAAPVSSTSSLPLA | 1235 |
| | gccccggtctcctccacatcctcccttcccctggct | | ALNMRVRRRLSLFLNVRTQVAAD | |
| | gctctcaacatgcgagtgcggcgccgcctgtctct | | WTALAEEMDFEYLEIRQLETQAD | |
| | gttcttgaacgtgcggacacaggtggcggccga | | PTGRLLDAWQGRPGASVGRLLD | |
| | ctggaccgcgctggcggaggagatggactttga | | LLTKLGRDDVLLELGPSIEEDCQK | |
| | gtacttggagatccggcaactggagacacaagc | | YILKQQQEEAEKPLQVAAVDSSV | |
| | ggaccccactggcaggctgctggacgcctggc | | PRTAELAGITTLDDPLGHMPERF | |
| | agggacgccctggcgcctctgtaggccgactgc | | DAFICYCPSDI | |
| | tcgatctgcttaccaagctgggccgcgacgacgt | | | |
| | gctgctggagctgggacccagcattgaggagg | | | |
| | attgccaaaagtatatcttgaagcagcagcagg | | | |
| | aggaggctgagaagcctttacaggtggccgctg | | | |
| | tagacagcagtgtcccacggacagcagagctg | | | |
| | gcgggcatcaccacacttgatgaccccctgggg | | | |
| | catatgcctgagcgtttcgatgccttcatctgcta | | | |
| | ttgccccagcgacatc | | | |
| Linker | gtcgag | 1236 | VE | 1237 |
| CD40 | aaaaaggtggccaagaagccaaccaataagg | 1238 | KKVAKKPTNKAPHPKQEPQEINF | 1239 |
| | ccccccaccccaagcaggagccccaggagat | | PDDLPGSNTAAPVQETLHGCQP | |
| | caattttcccgacgatcttcctggctccaacactgc | | VTQEDGKESRISVQERQ | |
| | tgctccagtgcaggagactttacatggatgccaa | | | |
| | ccggtcacccaggaggatggcaaagagagtcg | | | |
| | catctcagtgcaggagagacag | | | |
| Linker | gtcgag | 1240 | VE | 1241 |
| FKBP_{V} | ggagtgcaggtggagactatctccccaggagac | 1242 | GVQVETISPGDGRTFPKRGQTCV | 1243 |
| | gggcgcaccttccccaagcgcggccagacctg | | VHYTGMLEDGKKVDSSRDRNKP | |
| | cgtggtgcactacaccgggatgcttgaagatgg | | FKFMLGKQEVIRGWEEGVAQMS | |
| | aaagaaagttgattcctcccgggacagaaaca | | VGQRAKLTISPDYAYGATGHPGII | |
| | agccctttaagtttatgctaggcaagcaggaggt | | PPHATLVFDVELLKLE | |
| | gatccgaggctgggaagaaggggttgcccaga | | | |
| | tgagtgtgggtcagagagccaaactgactatatc | | | |
| | tccagattatgcctatggtgccactgggcaccca | | | |
| | ggcatcatcccaccacatgccactctcgtcttcga | | | |
| | tgtggagcttctaaaactggaa | | | |
| STOP | TGA | 1244 | stop | |

Appendix 8: pBP1320-pSFG-FKBP.FRB.ΔC9.T2A-αPSCA.Q.CD8stm.ζ.P2A-MC

| | | SEQ | | SEQ |
|---|---|---|---|---|
| | | ID | | ID |
| Fragment | Nucleotide | NO: | Peptide | NO: |
| Leader | ATGCtcgagcaattg | 1245 | MLEQL | 1246 |
| peptide | | | | |
| FKBP″ wt | GGcGTGCAaGTGGAaACTATaAGC | 1247 | GVQVETISPGDGRTFPKRGQTCV | 1248 |
| | CCgGGAGAcGGCcGcACATTtCCC | | VHYTGMLEDGKKFDSSRDRNKP | |
| | AAgAGAGGcCAGACcTGCGTgGTG | | FKFMLGKQEVIRGWEEGVAQMS | |
| | CAcTATACaGGAATGCTGGAgGAC | | VGQRAKLTISPDYAYGATGHPGII | |
| | GGgAAGAAaTTCGAtAGCtcCCGGG | | PPHATLVFDVELLKLE | |
| | AtCGAAAtAAGCCtTTCAAaTTCATG | | | |
| | CTGGGcAAGCAaGAAGTcATCaGa | | | |
| | GGCTGGGAaGAAGGcGTCGCcCA | | | |
| | GATGTCcGTGGGtCAGcGcGCCAA | | | |
| | gCTGACaATTAGtCCAGAtTACGCc | | | |
| | TATGGcGCAACaGGCCAtCCCGGc | | | |
| | ATCATcCCCCCaCATGCcACACTc | | | |
| | GTCTTtGATGTcGAGCTcCTGAAaC | | | |
| | TGGAg | | | |
| Linker | GGCGGGcaattg | 1249 | ggql | 1250 |
| FRB | gaaatgTGGCATGAAGGGTTGGAAG | 1251 | EMWHEGLEEASRLYFGERNVKG | 1252 |
| | AAGCTTCAAGGCTGTACTTCGGA | | MFEVLEPLHAMMERGPQTLKETS | |
| | GAGAGGAACGTGAAGGGCATGTT | | FNQAYGRDLMEAQEWCRKYMK | |
| | TGAGGTTCTTGAACCTCTGCACG | | SGNVKDLTQAVVDLYYHVFRRISK | |
| | CCATGATGGAACGGGGACCGCAG | | | |
| | ACACTGAAAGAAACCTCTTTTAAT | | | |
| | CAGGCCTACGGCAGAGACCTGAT | | | |
| | GGAGGCCCAAGAATGGTGTAGAA | | | |
| | AGTATATGAAATCCGGTAACGTGA | | | |
| | AAGACCTGactCAGGCCTGGGACC | | | |
| | TTTATTACCATGTGTTCAGGCGGA | | | |
| | TCAGTAAG | | | |
| Linker | TCAGGCGGTGGCTCAGGTccatgg | 1253 | SGGGSGPW | 1254 |
| Δcaspase- | GGATTTGGTGATGTCGGTGCTCT | 1255 | GFGDVGALESLRGNADLAYILSM | 1256 |
| 9_{Q} | TGAGAGTTTGAGGGGAAATGCAG | | EPCGHCLIINNVNFCRESGLRTRT | |
| | ATTTGGCTTACATCCTGAGCATGG | | GSNIDCEKLRRRFSSLHFMVEVK | |
| | AGCCCTGTGGCCACTGCCTCATT | | GDLTAKKMVLALLELARQDHGAL | |
| | ATCAACAATGTGAACTTCTGCCGT | | DCCVVVILSHGCQASHLQFPGAV | |
| | GAGTCCGGGCTCCGCACCCGCA | | YGTDGCPVSVEKIVNIFNGTSCPS | |
| | CTGGCTCCAACATCGACTGTGAG | | LGGKPKLFFIQACGGEQKDHGFE | |
| | AAGTTGCGGCGTCGCTTCTCCTC | | VASTSPEDESPGSNPEPDATPFQ | |
| | GCTGCATTTCATGGTGGAGGTGA | | EGLRTFDQLDAISSLPTPSDIFVS | |
| | AGGGCGACCTGACTGCCAAGAAA | | YSTFPGFVSVVRDPKSGSVVYVET | |
| | ATGGTGCTGGCTTTGCTGGAGCT | | LDDIFEQWAHSEDLQSLLLRVAN | |
| | GGCGCgGCAGGACCACGGTGCTC | | AVSVKGIYKQMPGCFQFLRKKLF | |
| | TGGACTGCTGCGTGGTGGTCATT | | FKTSASRA | |
| | CTCTCTCACGGCTGTCAGGCCAG | | | |
| | CCACCTGCAGTTCCCAGGGGCTG | | | |
| | TCTACGGCACAGATGGATGCCCT | | | |
| | GTGTCGGTCGAGAAGATTGTGAA | | | |
| | CATCTTCAATGGGACCAGCTGCC | | | |
| | CCAGCCTGGGAGGGAAGCCCAA | | | |
| | GCTCTTTTTCATCCAGGCCTGTGG | | | |
| | TGGGGAGCAGAAAGAtCATGGGT | | | |
| | TTGAGGTGGCCTCCACTTCCCCT | | | |
| | GAAGACGAGTCCCCTGGCAGTAA | | | |
| | CCCCGAGCCAGATGCCACCCCGT | | | |
| | TCCAGGAAGGTTTGAGGACCTTC | | | |
| | GACCAGCTGGACGCCATATCTAG | | | |
| | TTTGCCCACACCCAGTGACATCTT | | | |
| | TGTGTCCTACTCTACTTTCCCAGG | | | |
| | TTTTGTTTCCTGGAGGGACCCCAA | | | |
| | GAGTGGCTCCTGGTACGTTGAGA | | | |
| | CCCTGGACGACATCTTTGAGCAG | | | |
| | TGGGCTCACTCTGAAGACCTGCA | | | |
| | GTCCCTCCTGCTTAGGGTCGCTA | | | |
| | ATGCTGTTTCGGTGAAAGGGATTT | | | |
| | ATAAACAGATGCCTGGTTGCTTTc | | | |
| | AaTTCCTCCGGAAAAAACTTTTCT | | | |
| | TTAAAACATCAGCTAGCAGAGCC | | | |
| Linker | ggatctggaccgcGG | 1257 | GSGPR | 1258 |
| T2A | GAAGGCCGAGGGAGCCTGCTGA | 1259 | EGRGSLLTCGDVEENPGP | 1260 |
| | CATGTGGCGATGTGGAGGAAAAC | | | |
| | CCAGGACCA | | | |
| Linker | CCATGG | 1261 | PW | 1262 |
| Signal | ATGGAGTTTGGACTTTCTTGGTTG | 1263 | MEFGLSVVLFLVAILKGVQCSR | 1264 |
| Peptide | TTTTTGGTGGCAATTCTGAAGGGT | | | |
| | GTCCAGTGTAGCAGG | | | |
| PSCA(A11) | GACATCCAACTGACGCAAAGCCC | 1265 | DIQLTQSPSTLSASMGDRVTITCS | 1266 |
| VL | ATCTACACTCAGCGCTAGCATGG | | ASSSVRFIHVVYQQKPGKAPKRLI | |
| | GGGACAGGGTCACAATCACGTGC | | YDTSKLASGVPSRFSGSGSGTDF | |
| | TCTGCCTCAAGTTCCGTTAGGTTT | | TLTISSLQPEDFATYYCQQWGSS | |
| | ATCCATTGGTATCAGCAGAAACCT | | PFTFGQGTKVEIK | |
| | GGAAAGGCCCCAAAAAGACTGAT | | | |
| | CTATGATACCAGCAAGCTGGCTT | | | |
| | CCGGAGTGCCCTCAAGGTTCTCA | | | |
| | GGATCTGGCAGTGGGACCGATTT | | | |
| | CACCCTGACAATTAGCAGCCTTCA | | | |
| | GCCAGAGGATTTCGCAACCTATTA | | | |
| | CTGTCAGCAATGGGGGTCCAGCC | | | |
| | CATTCACTTTCGGCCAAGGAACAA | | | |
| | AGGTGGAGATAAAA | | | |
| Flex | GGCGGAGGAAGCGGAGGTGGGG | 1267 | gggsgggg | 1268 |
| | GC | | | |
| PSCA(A11) | GAGGTGCAGCTCGTGGAGTATGG | 1269 | EVQLVEYGGGLVQPGGSLRLSC | 1270 |
| VH | CGGGGGCCTGGTGCAGCCTGGG | | AASGFNIKDYYIHVVVRQAPGKGL | |
| | GGTAGTCTGAGGCTCTCCTGCGC | | EVVVAWIDPENGDTEFVPKFQGR | |
| | TGCCTCTGGCTTTAACATTAAAGA | | ATMSADTSKNTAYLQMNSLRAED | |
| | CTACTACATACATTGGGTGCGGC | | TAVYYCKTGGFWGQGTLVTVSS | |
| | AGGCCCCAGGCAAAGGGCTCGAA | | | |
| | TGGGTGGCCTGGATTGACCCTGA | | | |
| | GAATGGTGACACTGAGTTTGTCC | | | |
| | CCAAGTTTCAGGGCAGAGCCACC | | | |
| | ATGAGCGCTGACACAAGCAAAAA | | | |
| | CACTGCTTATCTCCAAATGAATAG | | | |
| | CCTGCGAGCTGAAGATACAGCAG | | | |
| | TCTATTACTGCAAGACGGGAGGA | | | |
| | TTCTGGGGCCAGGGAACTCTGGT | | | |
| | GACAGTTAGTTCC | | | |
| Linker | GGATCC | 1271 | gs | 1272 |
| CD34 | GAACTTCCTACTCAGGGGACTTTC | 1273 | ELPTQGTFSNVSTNVS | 1274 |
| epitope | TCAAACGTTAGCACAAACGTAAGT | | | |
| CD8 | CCCGCCCCAAGACCCCCCACACC | 1275 | PAPRPPTPAPTIASQPLSLRPEAC | 1276 |
| stalk | TGCGCCGACCATTGCTTCTCAAC | | RPAAGGAVHTRGLDFACD | |
| | CCCTGAGTTTGAGACCCGAGGCC | | | |
| | TGCCGGCCAGCTGCCGGCGGGG | | | |
| | CCGTGCATACAAGAGGACTCGAT | | | |
| | TTCGCTTGCGAC | | | |
| CD8 | ATCTATATCTGGGCACCTCTCGCT | 1277 | IYIWAPLAGTCGVLLLSLVITLYCN | 1278 |
| trans- | GGCACCTGTGGAGTCCTTCTGCT | | HRNRRRVCKCPR | |
| membrane | CAGCCTGGTTATTACTCTGTACTG | | | |
| | TAATCACCGGAATCGCCGCCGCG | | | |
| | TTTGTAAGTGTCCCAGG | | | |
| Linker | GTCGAC | 1279 | VD | 1280 |
| CD3ζ | AGAGTGAAGTTCAGCAGGAGCGC | 1281 | RVKFSRSADAPAYQQGQNQLYN | 1282 |
| | AGACGCCCCCGCGTACCAGCAG | | ELNLGRREEYDVLDKRRGRDPE | |
| | GGCCAGAACCAGCTCTATAACGA | | MGGKPRRKNPQEGLYNELQKDK | |
| | GCTCAATCTAGGACGAAGAGAGG | | MAEAYSEIGMKGERRRGKGHDG | |
| | AGTACGATGTTTTGGACAAGAGA | | LYQGLSTATKDTYDALHMQALPP | |
| | CGTGGCCGGGACCCTGAGATGG | | R | |
| | GGGGAAAGCCGAGAAGGAAGAA | | | |
| | CCCTCAGGAAGGCCTGTACAATG | | | |
| | AACTGCAGAAAGATAAGATGGCG | | | |
| | GAGGCCTACAGTGAGATTGGGAT | | | |
| | GAAAGGCGAGCGCCGGAGGGGC | | | |
| | AAGGGGCACGATGGCCTTTACCA | | | |
| | GGGTCTCAGTACAGCCACCAAGG | | | |
| | ACACCTACGACGCCCTTCACATG | | | |
| | CAAGCTCTTCCACCTCGT | | | |
| P2A | GCAACGAATTTTTCCCTGCTGAAA | 1283 | ATNFSLLKQAGDVEENPGP | 1284 |
| | CAGGCAGGGGACGTAGAGGAAAA | | | |
| | TCCTGGTCCT | | | |
| MyD88 | atggctgcaggaggtcccggcgcggggtctgcg | 1285 | MAAGGPGAGSAAPVSSTSSLPLA | 1286 |
| | gccccggtctcctccacatcctcccttcccctggct | | ALNMRVRRRLSLFLNVRTQVAAD | |
| | gctctcaacatgcgagtgcggcgccgcctgtctct | | WTALAEEMDFEYLEIRQLETQAD | |
| | gttcttgaacgtgcggacacaggtggcggccga | | PTGRLLDAWQGRPGASVGRLLD | |
| | ctggaccgcgctggcggaggagatggactttga | | LLTKLGRDDVLLELGPSIEEDCQK | |
| | gtacttggagatccggcaactggagacacaagc | | YILKQQQEEAEKPLQVAAVDSSV | |
| | ggaccccactggcaggctgctggacgcctggc | | PRTAELAGITTLDDPLGHMPERF | |
| | agggacgccctggcgcctctgtaggccgactgc | | DAFICYCPSDI | |
| | tcgatctgcttaccaagctgggccgcgacgacgt | | | |
| | gctgctggagctgggacccagcattgaggagg | | | |
| | attgccaaaagtatatcttgaagcagcagcagg | | | |
| | aggaggctgagaagcctttacaggtggccgctg | | | |
| | tagacagcagtgtcccacggacagcagagctg | | | |
| | gcgggcatcaccacacttgatgaccccctgggg | | | |
| | catatgcctgagcgtttcgatgccttcatctgcta | | | |
| | ttgccccagcgacatc | | | |
| Linker | gtcgag | 1287 | VE | 1288 |
| CD40 | aaaaaggtggccaagaagccaaccaataagg | 1289 | KKVAKKPTNKAPHPKQEPQEINF | 1290 |
| | ccccccaccccaagcaggagccccaggagat | | PDDLPGSNTAAPVQETLHGCQP | |
| | caattttcccgacgatcttcctggctccaacactgc | | VTQEDGKESRISVQERQ | |
| | tgctccagtgcaggagactttacatggatgccaa | | | |
| | ccggtcacccaggaggatggcaaagagagtcg | | | |
| | catctcagtgcaggagagacag | | | |
| STOP | TGA | 1291 | stop | |

Appendix 9: pBP1321-pSFG-FKBP.FRB.ΔC9.T2A-αPSCA.Q.CD8stm.ζ.P2A-MC.FKBPᵥ.FKBP

| | | SEQ | | SEQ |
|---|---|---|---|---|
| | | ID | | ID |
| Fragment | Nucleotide | NO: | Peptide | NO: |
| Leader | ATGCtcgagcaattg | 1292 | MLEQL | 1293 |
| peptide | | | | |
| FKBP″ wt | GGcGTGCAaGTGGAaACTATaAGC | 1294 | GVQVETISPGDGRTFPKRGQTCV | 1295 |
| | CCgGGAGAcGGCcGcACATTtCCC | | VHYTGMLEDGKKFDSSRDRNKP | |
| | AAgAGAGGcCAGACcTGCGTgGTG | | FKFMLGKQEVIRGWEEGVAQMS | |
| | CAcTATACaGGAATGCTGGAgGAC | | VGQRAKLTISPDYAYGATGHPGII | |
| | GGgAAGAAaTTCGAtAGCtcCCGGG | | PPHATLVFDVELLKLE | |
| | AtCGAAAtAAGCCtTTCAAaTTCATG | | | |
| | CTGGGcAAGCAaGAAGTcATCaGa | | | |
| | GGCTGGGAaGAAGGcGTCGCcCA | | | |
| | GATGTCcGTGGGtCAGcGcGCCAA | | | |
| | gCTGACaATTAGtCCAGAtTACGCc | | | |
| | TATGGcGCAACaGGCCAtCCCGGc | | | |
| | ATCATcCCCCCaCATGCcACACTc | | | |
| | GTCTTtGATGTcGAGCTcCTGAAaC | | | |
| | TGGAg | | | |
| Linker | GGCGGGcaattg | 1296 | ggql | 1297 |
| FRB | gaaatgTGGCATGAAGGGTTGGAAG | 1298 | EMWHEGLEEASRLYFGERNVKG | 1299 |
| | AAGCTTCAAGGCTGTACTTCGGA | | MFEVLEPLHAMMERGPQTLKETS | |
| | GAGAGGAACGTGAAGGGCATGTT | | FNQAYGRDLMEAQEWCRKYMK | |
| | TGAGGTTCTTGAACCTCTGCACG | | SGNVKDLTQAVVDLYYHVFRRISK | |
| | CCATGATGGAACGGGGACCGCAG | | | |
| | ACACTGAAAGAAACCTCTTTTAAT | | | |
| | CAGGCCTACGGCAGAGACCTGAT | | | |
| | GGAGGCCCAAGAATGGTGTAGAA | | | |
| | AGTATATGAAATCCGGTAACGTGA | | | |
| | AAGACCTGactCAGGCCTGGGACC | | | |
| | TTTATTACCATGTGTTCAGGCGGA | | | |
| | TCAGTAAG | | | |
| Linker | TCAGGCGGTGGCTCAGGTccatgg | 1300 | SGGGSGPW | 1301 |
| Δcaspase9 | GGATTTGGTGATGTCGGTGCTCT | 1302 | GFGDVGALESLRGNADLAYILSM | 1303 |
| | TGAGAGTTTGAGGGGAAATGCAG | | EPCGHCLIINNVNFCRESGLRTRT | |
| | ATTTGGCTTACATCCTGAGCATGG | | GSNIDCEKLRRRFSSLHFMVEVK | |
| | AGCCCTGTGGCCACTGCCTCATT | | GDLTAKKMVLALLELARQDHGAL | |
| | ATCAACAATGTGAACTTCTGCCGT | | DCCVVVILSHGCQASHLQFPGAV | |
| | GAGTCCGGGCTCCGCACCCGCA | | YGTDGCPVSVEKIVNIFNGTSCPS | |
| | CTGGCTCCAACATCGACTGTGAG | | LGGKPKLFFIQACGGEQKDHGFE | |
| | AAGTTGCGGCGTCGCTTCTCCTC | | VASTSPEDESPGSNPEPDATPFQ | |
| | GCTGCATTTCATGGTGGAGGTGA | | EGLRTFDQLDAISSLPTPSDIFVS | |
| | AGGGCGACCTGACTGCCAAGAAA | | YSTFPGFVSVVRDPKSGSVVYVET | |
| | ATGGTGCTGGCTTTGCTGGAGCT | | LDDIFEQWAHSEDLQSLLLRVAN | |
| | GGCGCgGCAGGACCACGGTGCTC | | AVSVKGIYKQMPGCFNFLRKKLF | |
| | TGGACTGCTGCGTGGTGGTCATT | | FKTSASRA | |
| | CTCTCTCACGGCTGTCAGGCCAG | | | |
| | CCACCTGCAGTTCCCAGGGGCTG | | | |
| | TCTACGGCACAGATGGATGCCCT | | | |
| | GTGTCGGTCGAGAAGATTGTGAA | | | |
| | CATCTTCAATGGGACCAGCTGCC | | | |
| | CCAGCCTGGGAGGGAAGCCCAA | | | |
| | GCTCTTTTTCATCCAGGCCTGTGG | | | |
| | TGGGGAGCAGAAAGAtCATGGGT | | | |
| | TTGAGGTGGCCTCCACTTCCCCT | | | |
| | GAAGACGAGTCCCCTGGCAGTAA | | | |
| | CCCCGAGCCAGATGCCACCCCGT | | | |
| | TCCAGGAAGGTTTGAGGACCTTC | | | |
| | GACCAGCTGGACGCCATATCTAG | | | |
| | TTTGCCCACACCCAGTGACATCTT | | | |
| | TGTGTCCTACTCTACTTTCCCAGG | | | |
| | TTTTGTTTCCTGGAGGGACCCCAA | | | |
| | GAGTGGCTCCTGGTACGTTGAGA | | | |
| | CCCTGGACGACATCTTTGAGCAG | | | |
| | TGGGCTCACTCTGAAGACCTGCA | | | |
| | GTCCCTCCTGCTTAGGGTCGCTA | | | |
| | ATGCTGTTTCGGTGAAAGGGATTT | | | |
| | ATAAACAGATGCCTGGTTGCTTTA | | | |
| | ATTTCCTCCGGAAAAAACTTTTCT | | | |
| | TTAAAACATCAGCTAGCAGAGCC | | | |
| Linker | ggatctggaccgcGG | 1304 | GSGPR | 1305 |
| T2A | GAAGGCCGAGGGAGCCTGCTGA | 1306 | EGRGSLLTCGDVEENPGP | 1307 |
| | CATGTGGCGATGTGGAGGAAAAC | | | |
| | CCAGGACCA | | | |
| Linker | CCATGG | 1308 | PW | 1309 |
| Signal | ATGGAGTTTGGACTTTCTTGGTTG | 1310 | MEFGLSVVLFLVAILKGVQCSR | 1311 |
| Peptide | TTTTTGGTGGCAATTCTGAAGGGT | | | |
| | GTCCAGTGTAGCAGG | | | |
| PSCA(A11) | GACATCCAACTGACGCAAAGCCC | 1312 | DIQLTQSPSTLSASMGDRVTITCS | 1313 |
| VL | ATCTACACTCAGCGCTAGCATGG | | ASSSVRFIHVVYQQKPGKAPKRLI | |
| | GGGACAGGGTCACAATCACGTGC | | YDTSKLASGVPSRFSGSGSGTDF | |
| | TCTGCCTCAAGTTCCGTTAGGTTT | | TLTISSLQPEDFATYYCQQWGSS | |
| | ATCCATTGGTATCAGCAGAAACCT | | PFTFGQGTKVEIK | |
| | GGAAAGGCCCCAAAAAGACTGAT | | | |
| | CTATGATACCAGCAAGCTGGCTT | | | |
| | CCGGAGTGCCCTCAAGGTTCTCA | | | |
| | GGATCTGGCAGTGGGACCGATTT | | | |
| | CACCCTGACAATTAGCAGCCTTCA | | | |
| | GCCAGAGGATTTCGCAACCTATTA | | | |
| | CTGTCAGCAATGGGGGTCCAGCC | | | |
| | CATTCACTTTCGGCCAAGGAACAA | | | |
| | AGGTGGAGATAAAA | | | |
| Flex | GGCGGAGGAAGCGGAGGTGGGG | 1314 | gggsgggg | 1315 |
| | GC | | | |
| PSCA(A11) | GAGGTGCAGCTCGTGGAGTATGG | 1316 | EVQLVEYGGGLVQPGGSLRLSC | 1317 |
| VH | CGGGGGCCTGGTGCAGCCTGGG | | AASGFNIKDYYIHVVVRQAPGKGL | |
| | GGTAGTCTGAGGCTCTCCTGCGC | | EVVVAWIDPENGDTEFVPKFQGR | |
| | TGCCTCTGGCTTTAACATTAAAGA | | ATMSADTSKNTAYLQMNSLRAED | |
| | CTACTACATACATTGGGTGCGGC | | TAVYYCKTGGFWGQGTLVTVSS | |
| | AGGCCCCAGGCAAAGGGCTCGAA | | | |
| | TGGGTGGCCTGGATTGACCCTGA | | | |
| | GAATGGTGACACTGAGTTTGTCC | | | |
| | CCAAGTTTCAGGGCAGAGCCACC | | | |
| | ATGAGCGCTGACACAAGCAAAAA | | | |
| | CACTGCTTATCTCCAAATGAATAG | | | |
| | CCTGCGAGCTGAAGATACAGCAG | | | |
| | TCTATTACTGCAAGACGGGAGGA | | | |
| | TTCTGGGGCCAGGGAACTCTGGT | | | |
| | GACAGTTAGTTCC | | | |
| Linker | GGATCC | 1318 | gs | 1319 |
| CD34 | GAACTTCCTACTCAGGGGACTTTC | 1320 | ELPTQGTFSNVSTNVS | 1321 |
| epitope | TCAAACGTTAGCACAAACGTAAGT | | | |
| CD8 stalk | CCCGCCCCAAGACCCCCCACACC | 1322 | PAPRPPTPAPTIASQPLSLRPEAC | 1323 |
| | TGCGCCGACCATTGCTTCTCAAC | | RPAAGGAVHTRGLDFACD | |
| | CCCTGAGTTTGAGACCCGAGGCC | | | |
| | TGCCGGCCAGCTGCCGGCGGGG | | | |
| | CCGTGCATACAAGAGGACTCGAT | | | |
| | TTCGCTTGCGAC | | | |
| CD8 | ATCTATATCTGGGCACCTCTCGCT | 1324 | IYIWAPLAGTCGVLLLSLVITLYCN | 1325 |
| trans- | GGCACCTGTGGAGTCCTTCTGCT | | HRNRRRVCKCPR | |
| membrane | CAGCCTGGTTATTACTCTGTACTG | | | |
| | TAATCACCGGAATCGCCGCCGCG | | | |
| | TTTGTAAGTGTCCCAGG | | | |
| Linker | GTCGAC | 1326 | VD | 1327 |
| CD3ζ | AGAGTGAAGTTCAGCAGGAGCGC | 1328 | RVKFSRSADAPAYQQGQNQLYN | 1329 |
| | AGACGCCCCCGCGTACCAGCAG | | ELNLGRREEYDVLDKRRGRDPE | |
| | GGCCAGAACCAGCTCTATAACGA | | MGGKPRRKNPQEGLYNELQKDK | |
| | GCTCAATCTAGGACGAAGAGAGG | | MAEAYSEIGMKGERRRGKGHDG | |
| | AGTACGATGTTTTGGACAAGAGA | | LYQGLSTATKDTYDALHMQALPP | |
| | CGTGGCCGGGACCCTGAGATGG | | R | |
| | GGGGAAAGCCGAGAAGGAAGAA | | | |
| | CCCTCAGGAAGGCCTGTACAATG | | | |
| | AACTGCAGAAAGATAAGATGGCG | | | |
| | GAGGCCTACAGTGAGATTGGGAT | | | |
| | GAAAGGCGAGCGCCGGAGGGGC | | | |
| | AAGGGGCACGATGGCCTTTACCA | | | |
| | GGGTCTCAGTACAGCCACCAAGG | | | |
| | ACACCTACGACGCCCTTCACATG | | | |
| | CAAGCTCTTCCACCTCGT | | | |
| Linker | gGAACGCGTGGATCGGGA | 1330 | GTRGSG | 1331 |
| P2A | GCTACTAACTTCAGCCTGCTGAA | 1332 | ATNFSLLKQAGDVEENPGP | 1333 |
| | GCAGGCTGGAGACGTGGAGGAG | | | |
| | AACcccgggcct | | | |
| MyD88 | atggctgcaggaggtcccggcgcggggtctgcg | 1334 | MAAGGPGAGSAAPVSSTSSLPLA | 1335 |
| | gccccggtctcctccacatcctcccttcccctggct | | ALNMRVRRRLSLFLNVRTQVAAD | |
| | gctctcaacatgcgagtgcggcgccgcctgtctct | | WTALAEEMDFEYLEIRQLETQAD | |
| | gttcttgaacgtgcggacacaggtggcggccga | | PTGRLLDAWQGRPGASVGRLLD | |
| | ctggaccgcgctggcggaggagatggactttga | | LLTKLGRDDVLLELGPSIEEDCQK | |
| | gtacttggagatccggcaactggagacacaagc | | YILKQQQEEAEKPLQVAAVDSSV | |
| | ggaccccactggcaggctgctggacgcctggc | | PRTAELAGITTLDDPLGHMPERF | |
| | agggacgccctggcgcctctgtaggccgactgc | | DAFICYCPSDI | |
| | tcgatctgcttaccaagctgggccgcgacgacgt | | | |
| | gctgctggagctgggacccagcattgaggagg | | | |
| | attgccaaaagtatatcttgaagcagcagcagg | | | |
| | aggaggctgagaagcctttacaggtggccgctg | | | |
| | tagacagcagtgtcccacggacagcagagctg | | | |
| | gcgggcatcaccacacttgatgaccccctgggg | | | |
| | catatgcctgagcgtttcgatgccttcatctgct | | | |
| | attgccccagcgacatc | | | |
| Linker | gtcgag | 1336 | VE | 1337 |
| CD40 | aaaaaggtggccaagaagccaaccaataagg | 1338 | KKVAKKPTNKAPHPKQEPQEINF | 1339 |
| | ccccccaccccaagcaggagccccaggagat | | PDDLPGSNTAAPVQETLHGCQP | |
| | caattttcccgacgatcttcctggctccaacactgc | | VTQEDGKESRISVQERQ | |
| | tgctccagtgcaggagactttacatggatgccaa | | | |
| | ccggtcacccaggaggatggcaaagagagtcg | | | |
| | catctcagtgcaggagagacag | | | |
| Linker | gtcgag | 1340 | VE | 1341 |
| FKBP_{V}′ | GGcGTcCAaGTcGAaACcATtagtCCc | 1342 | GVQVETISPGDGRTFPKRGQTCV | 1343 |
| | GGcGAtGGcaGaACaTTtCCtAAaaG | | VHYTGMLEDGKKVDSSRDRNKP | |
| | gGGaCAaACaTGtGTcGTcCAtTAtA | | FKFMLGKQEVIRGWEEGVAQMS | |
| | CaGGcATGtTgGAgGAcGGcAAaAA | | VGQRAKLTISPDYAYGATGHPGII | |
| | gGTgGAcagtagtaGaGAtcGcAAtAAa | | PPHATLVFDVELLKLE | |
| | CCtTTcAAaTTcATGtTgGGaAAaCAa | | | |
| | GAaGTcATtaGgGGaTGGGAgGAgG | | | |
| | GcGTgGCtCAaATGtccGTcGGcCAa | | | |
| | cGcGCtAAgCTcACcATcagcCCcGAc | | | |
| | TAcGCaTAcGGcGCtACcGGaCAtCC | | | |
| | cGGaATtATtCCcCCtCAcGCtACctTg | | | |
| | GTgTTtGAcGTcGAaCTgtTgAAgCTc | | | |
| | GAa | | | |
| Linker | gtcgag | 1344 | VE | 1345 |
| FKBP wt | ggagtgcaggtggagactatctccccaggagac | 1346 | GVQVETISPGDGRTFPKRGQTCV | 1347 |
| | gggcgcaccttccccaagcgcggccagacctg | | VHYTGMLEDGKKFDSSRDRNKP | |
| | cgtggtgcactacaccgggatgcttgaagatgg | | FKFMLGKQEVIRGWEEGVAQMS | |
| | aaagaaaTttgattcctcccgggacagaaaca | | VGQRAKLTISPDYAYGATGHPGII | |
| | agccctttaagtttatgctaggcaagcaggaggt | | PPHATLVFDVELLKLE | |
| | gatccgaggctgggaagaaggggttgcccaga | | | |
| | tgagtgtgggtcagagagccaaactgactatatc | | | |
| | tccagattatgcctatggtgccactgggcaccca | | | |
| | ggcatcatcccaccacatgccactctcgtcttcga | | | |
| | tgtggagcttctaaaactggaa | | | |
| STOP | TGA | 1348 | stop | |

Appendix 10: pBP1151-pSFG-MC-T2A-αCD19.Q.CD8stm.ζ

| | | SEQ | | SEQ |
|---|---|---|---|---|
| | | ID | | ID |
| Fragment | Nucleotide | NO: | Peptide | NO: |
| MyD88 | ATGGCTGCAGGAGGTCCCGGCG | 1349 | MAAGGPGAGSAAPVSSTSSLPLA | 1350 |
| | CGGGGTCTGCGGCCCCGGTCTC | | ALNMRVRRRLSLFLNVRTQVAAD | |
| | CTCCACATCCTCCCTTCCCCTGG | | WTALAEEMDFEYLEIRQLETQAD | |
| | CTGCTCTCAACATGCGAGTGCGG | | PTGRLLDAWQGRPGASVGRLLD | |
| | CGCCGCCTGTCTCTGTTCTTGAA | | LLTKLGRDDVLLELGPSIEEDCQK | |
| | CGTGCGGACACAGGTGGCGGCC | | YlLKQQQEEAEKPLQVAAVDSSV | |
| | GACTGGACCGCGCTGGCGGAGG | | PRTAELAGITTLDDPLGHMPERF | |
| | AGATGGACTTTGAGTACTTGGAG | | DAFICYCPSDI | |
| | ATCCGGCAACTGGAGACACAAGC | | | |
| | GGACCCCACTGGCAGGCTGCTG | | | |
| | GACGCCTGGCAGGGACGCCCTG | | | |
| | GCGCCTCTGTAGGCCGACTGCTC | | | |
| | GATCTGCTTACCAAGCTGGGCCG | | | |
| | CGACGACGTGCTGCTGGAGCTGG | | | |
| | GACCCAGCATTGAGGAGGATTGC | | | |
| | CAAAAGTATATCTTGAAGCAGCAG | | | |
| | CAGGAGGAGGCTGAGAAGCCTTT | | | |
| | ACAGGTGGCCGCTGTAGACAGCA | | | |
| | GTGTCCCACGGACAGCAGAGCTG | | | |
| | GCGGGCATCACCACACTTGATGA | | | |
| | CCCCCTGGGGCATATGCCTGAGC | | | |
| | GTTTCGATGCCTTCATCTGCTATT | | | |
| | GCCCCAGCGACATC | | | |
| Linker | GTCGAG | 1351 | VE | 1352 |
| CD40 | AAAAAGGTGGCCAAGAAGCCAAC | 1353 | KKVAKKPTNKAPHPKQEPQEINF | 1354 |
| | CAATAAGGCCCCCCACCCCAAGC | | PDDLPGSNTAAPVQETLHGCQP | |
| | AGGAGCCCCAGGAGATCAATTTT | | VTQEDGKESRISVQERQ | |
| | CCCGACGATCTTCCTGGCTCCAA | | | |
| | CACTGCTGCTCCAGTGCAGGAGA | | | |
| | CTTTACATGGATGCCAACCGGTC | | | |
| | ACCCAGGAGGATGGCAAAGAGAG | | | |
| | TCGCATCTCAGTGCAGGAGAGAC | | | |
| | AG | | | |
| Linker | GGATCTGGACCGCGG | 1355 | GSGPR | 1356 |
| T2A | GAAGGCCGAGGGAGCCTGCTGA | 1357 | EGRGSLLTCGDVEENPGP | 1358 |
| | CATGTGGCGATGTGGAGGAAAAC | | | |
| | CCAGGACCA | | | |
| Linker | CCACGG | 1359 | PR | 1360 |
| Signal | ATGGAGTTTGGACTTTCTTGGTTG | 1361 | MEFGLSVVLFLVAILKGVQCSR | 1362 |
| Peptide | TTTTTGGTGGCAATTCTGAAGGGT | | | |
| | GTCCAGTGTAGCAGG | | | |
| FMC63 VL | GACATCCAGATGACACAGACTAC | 1363 | DIQMTQTTSSLSASLGDRVTISCR | 1364 |
| | ATCCTCCCTGTCTGCCTCTCTGG | | ASQDISKYLNVVYQQKPDGTVKLL | |
| | GAGACAGAGTCACCATCAGTTGC | | IYHTSRLHSGVPSRFSGSGSGTD | |
| | AGGGCAAGTCAGGACATTAGTAA | | YSLTISNLEQEDIATYFCQQGNTL | |
| | ATATTTAAATTGGTATCAGCAGAA | | PYTFGGGTKLEIT | |
| | ACCAGATGGAACTGTTAAACTCCT | | | |
| | GATCTACCATACATCAAGATTACA | | | |
| | CTCAGGAGTCCCATCAAGGTTCA | | | |
| | GTGGCAGTGGGTCTGGAACAGAT | | | |
| | TATTCTCTCACCATTAGCAACCTG | | | |
| | GAGCAAGAAGATATTGCCACTTAC | | | |
| | TTTTGCCAACAGGGTAATACGCTT | | | |
| | CCGTACACGTTCGGAGGGGGGA | | | |
| | CTAAGTTGGAAATAACA | | | |
| Flex | GGCGGAGGAAGCGGAGGTGGGG | 1365 | GGGSGGGG | 1366 |
| | GC | | | |
| FMC63 VH | GAGGTGAAACTGCAGGAGTCAGG | 1367 | EVKLQESGPGLVAPSQSLSVTCT | 1368 |
| | ACCTGGCCTGGTGGCGCCCTCAC | | VSGVSLPDYGVSWIRQPPRKGLE | |
| | AGAGCCTGTCCGTCACATGCACT | | WLGVIWGSETTYYNSALKSRLTII | |
| | GTCTCAGGGGTCTCATTACCCGA | | KDNSKSQVFLKMNSLQTDDTAIY | |
| | CTATGGTGTAAGCTGGATTCGCC | | YCAKHYYYGGSYAMDYWGQGT | |
| | AGCCTCCACGAAAGGGTCTGGAG | | SVTVSS | |
| | TGGCTGGGAGTAATATGGGGTAG | | | |
| | TGAAACCACATACTATAATTCAGC | | | |
| | TCTCAAATCCAGACTGACCATCAT | | | |
| | CAAGGACAACTCCAAGAGCCAAG | | | |
| | TTTTCTTAAAAATGAACAGTCTGC | | | |
| | AAACTGATGACACAGCCATTTACT | | | |
| | ACTGTGCCAAACATTATTACTACG | | | |
| | GTGGTAGCTATGCTATGGACTACT | | | |
| | GGGGTCAAGGAACCTCAGTCACC | | | |
| | GTCTCCTCA | | | |
| Linker | GGATCC | 1369 | GS | 1370 |
| CD34 | GAACTTCCTACTCAGGGGACTTTC | 1371 | ELPTQGTFSNVSTNVS | 1372 |
| epitope | TCAAACGTTAGCACAAACGTAAGT | | | |
| CD8 | CCCGCCCCAAGACCCCCCACACC | 1373 | PAPRPPTPAPTIASQPLSLRPEAC | 1374 |
| stalk | TGCGCCGACCATTGCTTCTCAAC | | RPAAGGAVHTRGLDFACD | |
| | CCCTGAGTTTGAGACCCGAGGCC | | | |
| | TGCCGGCCAGCTGCCGGCGGGG | | | |
| | CCGTGCATACAAGAGGACTCGAT | | | |
| | TTCGCTTGCGAC | | | |
| CD8 | ATCTATATCTGGGCACCTCTCGCT | 1375 | IYIWAPLAGTCGVLLLSLVITLYCN | 1376 |
| trans- | GGCACCTGTGGAGTCCTTCTGCT | | HRNRRRVCKCPR | |
| membrane | CAGCCTGGTTATTACTCTGTACTG | | | |
| | TAATCACCGGAATCGCCGCCGCG | | | |
| | TTTGTAAGTGTCCCAGG | | | |
| Linker | GTCGAC | 1377 | VD | 1378 |
| CD3ζ | AGAGTGAAGTTCAGCAGGAGCGC | 1379 | RVKFSRSADAPAYQQGQNQLYN | 1380 |
| | AGACGCCCCCGCGTACCAGCAG | | ELNLGRREEYDVLDKRRGRDPE | |
| | GGCCAGAACCAGCTCTATAACGA | | MGGKPRRKNPQEGLYNELQKDK | |
| | GCTCAATCTAGGACGAAGAGAGG | | MAEAYSEIGMKGERRRGKGHDG | |
| | AGTACGATGTTTTGGACAAGAGA | | LYQGLSTATKDTYDALHMQALPP | |
| | CGTGGCCGGGACCCTGAGATGG | | R | |
| | GGGGAAAGCCGAGAAGGAAGAA | | | |
| | CCCTCAGGAAGGCCTGTACAATG | | | |
| | AACTGCAGAAAGATAAGATGGCG | | | |
| | GAGGCCTACAGTGAGATTGGGAT | | | |
| | GAAAGGCGAGCGCCGGAGGGGC | | | |
| | AAGGGGCACGATGGCCTTTACCA | | | |
| | GGGTCTCAGTACAGCCACCAAGG | | | |
| | ACACCTACGACGCCCTTCACATG | | | |
| | CAAGCTCTTCCACCTCGT | | | |

Appendix 11: pBP1152-pSFG-MC-T2A-αCD19.Q.CD8stm.

| | | SEQ | | SEQ |
|---|---|---|---|---|
| | | ID | | ID |
| Fragment | Nucleotide | NO: | Peptide | NO: |
| Myristoylation | ATGGGGAGTAGCAAGAGCAAG | 1381 | MGSSKSKPKDPSQR | 1382 |
| Targeting | CCTAAGGACCCCAGCCAGCGC | | | |
| sequence | | | | |
| MyD88 | ATGGCTGCAGGAGGTCCCGGC | 1383 | MAAGGPGAGSAAPVSSTSSLPLA | 1384 |
| | GCGGGGTCTGCGGCCCCGGT | | ALNMRVRRRLSLFLNVRTQVAAD | |
| | CTCCTCCACATCCTCCCTTCCC | | WTALAEEMDFEYLEIRQLETQAD | |
| | CTGGCTGCTCTCAACATGCGA | | PTGRLLDAWQGRPGASVGRLLD | |
| | GTGCGGCGCCGCCTGTCTCTG | | LLTKLGRDDVLLELGPSIEEDCQK | |
| | TTCTTGAACGTGCGGACACAG | | YILKQQQEEAEKPLQVAAVDSSV | |
| | GTGGCGGCCGACTGGACCGC | | PRTAELAGITTLDDPLGHMPERF | |
| | GCTGGCGGAGGAGATGGACTT | | DAFICYCPSDI | |
| | TGAGTACTTGGAGATCCGGCA | | | |
| | ACTGGAGACACAAGCGGACCC | | | |
| | CACTGGCAGGCTGCTGGACGC | | | |
| | CTGGCAGGGACGCCCTGGCG | | | |
| | CCTCTGTAGGCCGACTGCTCG | | | |
| | ATCTGCTTACCAAGCTGGGCC | | | |
| | GCGACGACGTGCTGCTGGAGC | | | |
| | TGGGACCCAGCATTGAGGAGG | | | |
| | ATTGCCAAAAGTATATCTTGAA | | | |
| | GCAGCAGCAGGAGGAGGCTG | | | |
| | AGAAGCCTTTACAGGTGGCCG | | | |
| | CTGTAGACAGCAGTGTCCCAC | | | |
| | GGACAGCAGAGCTGGCGGGC | | | |
| | ATCACCACACTTGATGACCCC | | | |
| | CTGGGGCATATGCCTGAGCGT | | | |
| | TTCGATGCCTTCATCTGCTATT | | | |
| | GCCCCAGCGACATC | | | |
| Linker | GTCGAG | 1385 | VE | 1386 |
| CD40 | AAAAAGGTGGCCAAGAAGCCA | 1387 | KKVAKKPTNKAPHPKQEPQEINF | 1388 |
| | ACCAATAAGGCCCCCCACCCC | | PDDLPGSNTAAPVQETLHGCQP | |
| | AAGCAGGAGCCCCAGGAGATC | | VTQEDGKESRISVQERQ | |
| | AATTTTCCCGACGATCTTCCTG | | | |
| | GCTCCAACACTGCTGCTCCAG | | | |
| | TGCAGGAGACTTTACATGGAT | | | |
| | GCCAACCGGTCACCCAGGAGG | | | |
| | ATGGCAAAGAGAGTCGCATCT | | | |
| | CAGTGCAGGAGAGACAG | | | |
| Linker | GGATCTGGACCGCGG | 1389 | GSGPR | 1390 |
| T2A | GAAGGCCGAGGGAGCCTGCT | 1391 | EGRGSLLTCGDVEENPGP | 1392 |
| | GACATGTGGCGATGTGGAGGA | | | |
| | AAACCCAGGACCA | | | |
| Linker | CCACGG | 1393 | PR | 1394 |
| Signal Peptide | ATGGAGTTTGGACTTTCTTGGT | 1395 | MEFGLSVVLFLVAILKGVQCSR | 1396 |
| | TGTTTTTGGTGGCAATTCTGAA | | | |
| | GGGTGTCCAGTGTAGCAGG | | | |
| FMC63 VL | GACATCCAGATGACACAGACT | 1397 | DIQMTQTTSSLSASLGDRVTISCR | 1398 |
| | ACATCCTCCCTGTCTGCCTCTC | | ASQDISKYLNVVYQQKPDGTVKLL | |
| | TGGGAGACAGAGTCACCATCA | | IYHTSRLHSGVPSRFSGSGSGTD | |
| | GTTGCAGGGCAAGTCAGGACA | | YSLTISNLEQEDIATYFCQQGNTL | |
| | TTAGTAAATATTTAAATTGGTAT | | PYTFGGGTKLEIT | |
| | CAGCAGAAACCAGATGGAACT | | | |
| | GTTAAACTCCTGATCTACCATA | | | |
| | CATCAAGATTACACTCAGGAGT | | | |
| | CCCATCAAGGTTCAGTGGCAG | | | |
| | TGGGTCTGGAACAGATTATTCT | | | |
| | CTCACCATTAGCAACCTGGAG | | | |
| | CAAGAAGATATTGCCACTTACT | | | |
| | TTTGCCAACAGGGTAATACGCT | | | |
| | TCCGTACACGTTCGGAGGGGG | | | |
| | GACTAAGTTGGAAATAACA | | | |
| Flex | GGCGGAGGAAGCGGAGGTGG | 1399 | GGGSGGGG | 1400 |
| | GGGC | | | |
| FMC63 VH | GAGGTGAAACTGCAGGAGTCA | 1401 | EVKLQESGPGLVAPSQSLSVTCT | 1402 |
| | GGACCTGGCCTGGTGGCGCC | | VSGVSLPDYGVSWIRQPPRKGLE | |
| | CTCACAGAGCCTGTCCGTCAC | | WLGVIWGSETTYYNSALKSRLTII | |
| | ATGCACTGTCTCAGGGGTCTC | | KDNSKSQVFLKMNSLQTDDTAIY | |
| | ATTACCCGACTATGGTGTAAGC | | YCAKHYYYGGSYAMDYWGQGT | |
| | TGGATTCGCCAGCCTCCACGA | | SVTVSS | |
| | AAGGGTCTGGAGTGGCTGGGA | | | |
| | GTAATATGGGGTAGTGAAACC | | | |
| | ACATACTATAATTCAGCTCTCA | | | |
| | AATCCAGACTGACCATCATCAA | | | |
| | GGACAACTCCAAGAGCCAAGT | | | |
| | TTTCTTAAAAATGAACAGTCTG | | | |
| | CAAACTGATGACACAGCCATTT | | | |
| | ACTACTGTGCCAAACATTATTA | | | |
| | CTACGGTGGTAGCTATGCTAT | | | |
| | GGACTACTGGGGTCAAGGAAC | | | |
| | CTCAGTCACCGTCTCCTCA | | | |
| Linker | GGATCC | 1403 | GS | 1404 |
| CD34 epitope | GAACTTCCTACTCAGGGGACTT | 1405 | ELPTQGTFSNVSTNVS | 1406 |
| | TCTCAAACGTTAGCACAAACGT | | | |
| | AAGT | | | |
| CD8 stalk | CCCGCCCCAAGACCCCCCACA | 1407 | PAPRPPTPAPTIASQPLSLRPEAC | 1408 |
| | CCTGCGCCGACCATTGCTTCT | | RPAAGGAVHTRGLDFACD | |
| | CAACCCCTGAGTTTGAGACCC | | | |
| | GAGGCCTGCCGGCCAGCTGC | | | |
| | CGGCGGGGCCGTGCATACAA | | | |
| | GAGGACTCGATTTCGCTTGCG | | | |
| | AC | | | |
| CD8 | ATCTATATCTGGGCACCTCTCG | 1409 | IYIWAPLAGTCGVLLLSLVITLYC | 1410 |
| trans- | CTGGCACCTGTGGAGTCCTTC | | NHRNRRRVCKCPR | |
| membrane | TGCTCAGCCTGGTTATTACTCT | | | |
| | GTACTGTAATCACCGGAATCG | | | |
| | CCGCCGCGTTTGTAAGTGTCC | | | |
| | CAGG | | | |
| Linker | GTCGAC | 1411 | VD | 1412 |
| CD3ζ | AGAGTGAAGTTCAGCAGGAGC | 1413 | RVKFSRSADAPAYQQGQNQLYN | 1414 |
| | GCAGACGCCCCCGCGTACCAG | | ELNLGRREEYDVLDKRRGRDPE | |
| | CAGGGCCAGAACCAGCTCTAT | | MGGKPRRKNPQEGLYNELQKDK | |
| | AACGAGCTCAATCTAGGACGA | | MAEAYSEIGMKGERRRGKGHDG | |
| | AGAGAGGAGTACGATGTTTTG | | LYQGLSTATKDTYDALHMQALPP | |
| | GACAAGAGACGTGGCCGGGA | | R | |
| | CCCTGAGATGGGGGGAAAGCC | | | |
| | GAGAAGGAAGAACCCTCAGGA | | | |
| | AGGCCTGTACAATGAACTGCA | | | |
| | GAAAGATAAGATGGCGGAGGC | | | |
| | CTACAGTGAGATTGGGATGAA | | | |
| | AGGCGAGCGCCGGAGGGGCA | | | |
| | AGGGGCACGATGGCCTTTACC | | | |
| | AGGGTCTCAGTACAGCCACCA | | | |
| | AGGACACCTACGACGCCCTTC | | | |
| | ACATGCAAGCTCTTCCACCTCG | | | |
| | T | | | |

Appendix 12: pBP1414-pSFG-αCD19.Q.CD8stm.ζ-P2A-MC

| | | SEQ | | SEQ |
|---|---|---|---|---|
| | | ID | | ID |
| Fragment | Nucleotide | NO: | Peptide | NO: |
| Signal | ATGGAGTTTGGACTTTCTTGGTTG | 1415 | MEFGLSVVLFLVAILKGVQCSR | 1416 |
| Peptide | TTTTTGGTGGCAATTCTGAAGGGT | | | |
| | GTCCAGTGTAGCAGG | | | |
| FMC63 VL | GACATCCAGATGACACAGACTAC | 1417 | DIQMTQTTSSLSASLGDRVTISCR | 1418 |
| | ATCCTCCCTGTCTGCCTCTCTGG | | ASQDISKYLNVVYQQKPDGTVKLL | |
| | GAGACAGAGTCACCATCAGTTGC | | IYHTSRLHSGVPSRFSGSGSGTD | |
| | AGGGCAAGTCAGGACATTAGTAA | | YSLTISNLEQEDIATYFCQQGNTL | |
| | ATATTTAAATTGGTATCAGCAGAA | | PYTFGGGTKLEIT | |
| | ACCAGATGGAACTGTTAAACTCCT | | | |
| | GATCTACCATACATCAAGATTACA | | | |
| | CTCAGGAGTCCCATCAAGGTTCA | | | |
| | GTGGCAGTGGGTCTGGAACAGAT | | | |
| | TATTCTCTCACCATTAGCAACCTG | | | |
| | GAGCAAGAAGATATTGCCACTTAC | | | |
| | TTTTGCCAACAGGGTAATACGCTT | | | |
| | CCGTACACGTTCGGAGGGGGGA | | | |
| | CTAAGTTGGAAATAACA | | | |
| Flex | GGCGGAGGAAGCGGAGGTGGGG | 1419 | GGGSGGGG | 1420 |
| | GC | | | |
| FMC63 VH | GAGGTGAAACTGCAGGAGTCAGG | 1421 | EVKLQESGPGLVAPSQSLSVTCT | 1422 |
| | ACCTGGCCTGGTGGCGCCCTCAC | | VSGVSLPDYGVSWIRQPPRKGLE | |
| | AGAGCCTGTCCGTCACATGCACT | | WLGVIWGSETTYYNSALKSRLTII | |
| | GTCTCAGGGGTCTCATTACCCGA | | KDNSKSQVFLKMNSLQTDDTAIY | |
| | CTATGGTGTAAGCTGGATTCGCC | | YCAKHYYYGGSYAMDYWGQGT | |
| | AGCCTCCACGAAAGGGTCTGGAG | | SVTVSS | |
| | TGGCTGGGAGTAATATGGGGTAG | | | |
| | TGAAACCACATACTATAATTCAGC | | | |
| | TCTCAAATCCAGACTGACCATCAT | | | |
| | CAAGGACAACTCCAAGAGCCAAG | | | |
| | TTTTCTTAAAAATGAACAGTCTGC | | | |
| | AAACTGATGACACAGCCATTTACT | | | |
| | ACTGTGCCAAACATTATTACTACG | | | |
| | GTGGTAGCTATGCTATGGACTACT | | | |
| | GGGGTCAAGGAACCTCAGTCACC | | | |
| | GTCTCCTCA | | | |
| Linker | GGATCC | 1423 | GS | 1424 |
| CD34 | GAACTTCCTACTCAGGGGACTTTC | 1425 | ELPTQGTFSNVSTNVS | 1426 |
| epitope | TCAAACGTTAGCACAAACGTAAGT | | | |
| CD8 stalk | CCCGCCCCAAGACCCCCCACACC | 1427 | PAPRPPTPAPTIASQPLSLRPEAC | 1428 |
| | TGCGCCGACCATTGCTTCTCAAC | | RPAAGGAVHTRGLDFACD | |
| | CCCTGAGTTTGAGACCCGAGGCC | | | |
| | TGCCGGCCAGCTGCCGGCGGGG | | | |
| | CCGTGCATACAAGAGGACTCGAT | | | |
| | TTCGCTTGCGAC | | | |
| CD8 | ATCTATATCTGGGCACCTCTCGCT | 1429 | IYIWAPLAGTCGVLLLSLVITLYCN | 1430 |
| trans- | GGCACCTGTGGAGTCCTTCTGCT | | HRNRRRVCKCPR | |
| membrane | CAGCCTGGTTATTACTCTGTACTG | | | |
| | TAATCACCGGAATCGCCGCCGCG | | | |
| | TTTGTAAGTGTCCCAGG | | | |
| Linker | GTCGAC | 1431 | VD | 1432 |
| CD3ζ | AGAGTGAAGTTCAGCAGGAGCGC | 1433 | RVKFSRSADAPAYQQGQNQLYN | 1434 |
| | AGACGCCCCCGCGTACCAGCAG | | ELNLGRREEYDVLDKRRGRDPE | |
| | GGCCAGAACCAGCTCTATAACGA | | MGGKPRRKNPQEGLYNELQKDK | |
| | GCTCAATCTAGGACGAAGAGAGG | | MAEAYSEIGMKGERRRGKGHDG | |
| | AGTACGATGTTTTGGACAAGAGA | | LYQGLSTATKDTYDALHMQALPP | |
| | CGTGGCCGGGACCCTGAGATGG | | R | |
| | GGGGAAAGCCGAGAAGGAAGAA | | | |
| | CCCTCAGGAAGGCCTGTACAATG | | | |
| | AACTGCAGAAAGATAAGATGGCG | | | |
| | GAGGCCTACAGTGAGATTGGGAT | | | |
| | GAAAGGCGAGCGCCGGAGGGGC | | | |
| | AAGGGGCACGATGGCCTTTACCA | | | |
| | GGGTCTCAGTACAGCCACCAAGG | | | |
| | ACACCTACGACGCCCTTCACATG | | | |
| | CAAGCTCTTCCACCTCGT | | | |
| P2A | GCTACTAACTTCAGCCTGCTGAA | 1435 | ATNFSLLKQAGDVEENPGP | 1436 |
| | GCAGGCTGGAGACGTGGAGGAG | | | |
| | AACCCCGGGCCT | | | |
| MyD88 | ATGGCTGCAGGAGGTCCCGGCG | 1437 | MAAGGPGAGSAAPVSSTSSLPLA | 1438 |
| | CGGGGTCTGCGGCCCCGGTCTC | | ALNMRVRRRLSLFLNVRTQVAAD | |
| | CTCCACATCCTCCCTTCCCCTGG | | WTALAEEMDFEYLEIRQLETQAD | |
| | CTGCTCTCAACATGCGAGTGCGG | | PTGRLLDAWQGRPGASVGRLLD | |
| | CGCCGCCTGTCTCTGTTCTTGAA | | LLTKLGRDDVLLELGPSIEEDCQK | |
| | CGTGCGGACACAGGTGGCGGCC | | YILKQQQEEAEKPLQVAAVDSSV | |
| | GACTGGACCGCGCTGGCGGAGG | | PRTAELAGITTLDDPLGHMPERF | |
| | AGATGGACTTTGAGTACTTGGAG | | DAFICYCPSDI | |
| | ATCCGGCAACTGGAGACACAAGC | | | |
| | GGACCCCACTGGCAGGCTGCTG | | | |
| | GACGCCTGGCAGGGACGCCCTG | | | |
| | GCGCCTCTGTAGGCCGACTGCTC | | | |
| | GATCTGCTTACCAAGCTGGGCCG | | | |
| | CGACGACGTGCTGCTGGAGCTGG | | | |
| | GACCCAGCATTGAGGAGGATTGC | | | |
| | CAAAAGTATATCTTGAAGCAGCAG | | | |
| | CAGGAGGAGGCTGAGAAGCCTTT | | | |
| | ACAGGTGGCCGCTGTAGACAGCA | | | |
| | GTGTCCCACGGACAGCAGAGCTG | | | |
| | GCGGGCATCACCACACTTGATGA | | | |
| | CCCCCTGGGGCATATGCCTGAGC | | | |
| | GTTTCGATGCCTTCATCTGCTATT | | | |
| | GCCCCAGCGACATC | | | |
| Linker | GTCGAG | 1439 | VE | 1440 |
| CD40 | AAAAAGGTGGCCAAGAAGCCAAC | 1441 | KKVAKKPTNKAPHPKQEPQEINF | 1442 |
| | CAATAAGGCCCCCCACCCCAAGC | | PDDLPGSNTAAPVQETLHGCQP | |
| | AGGAGCCCCAGGAGATCAATTTT | | VTQEDGKESRISVQERQ | |
| | CCCGACGATCTTCCTGGCTCCAA | | | |
| | CACTGCTGCTCCAGTGCAGGAGA | | | |
| | CTTTACATGGATGCCAACCGGTC | | | |
| | ACCCAGGAGGATGGCAAAGAGAG | | | |
| | TCGCATCTCAGTGCAGGAGAGAC | | | |
| | AG | | | |

Appendix 13: pBP1414-pSFG-αCD19.Q.CD8stm.ζ-P2A-MC

| | | SEQ | | SEQ |
|---|---|---|---|---|
| | | ID | | ID |
| Fragment | Nucleotide | NO: | Peptide | NO: |
| Signal | ATGGAGTTTGGACTTTCTTGGTTG | 1443 | MEFGLSVVLFLVAILKGVQCSR | 1444 |
| Peptide | TTTTTGGTGGCAATTCTGAAGGGT | | | |
| | GTCCAGTGTAGCAGG | | | |
| FMC63 VL | GACATCCAGATGACACAGACTAC | 1445 | DIQMTQTTSSLSASLGDRVTISCR | 1446 |
| | ATCCTCCCTGTCTGCCTCTCTGG | | ASQDISKYLNVVYQQKPDGTVKLL | |
| | GAGACAGAGTCACCATCAGTTGC | | IYHTSRLHSGVPSRFSGSGSGTD | |
| | AGGGCAAGTCAGGACATTAGTAA | | YSLTISNLEQEDIATYFCQQGNTL | |
| | ATATTTAAATTGGTATCAGCAGAA | | PYTFGGGTKLEIT | |
| | ACCAGATGGAACTGTTAAACTCCT | | | |
| | GATCTACCATACATCAAGATTACA | | | |
| | CTCAGGAGTCCCATCAAGGTTCA | | | |
| | GTGGCAGTGGGTCTGGAACAGAT | | | |
| | TATTCTCTCACCATTAGCAACCTG | | | |
| | GAGCAAGAAGATATTGCCACTTAC | | | |
| | TTTTGCCAACAGGGTAATACGCTT | | | |
| | CCGTACACGTTCGGAGGGGGGA | | | |
| | CTAAGTTGGAAATAACA | | | |
| Flex | GGCGGAGGAAGCGGAGGTGGGG | 1447 | GGGSGGGG | 1448 |
| | GC | | | |
| FMC63 VH | GAGGTGAAACTGCAGGAGTCAGG | 1449 | EVKLQESGPGLVAPSQSLSVTCT | 1450 |
| | ACCTGGCCTGGTGGCGCCCTCAC | | VSGVSLPDYGVSWIRQPPRKGLE | |
| | AGAGCCTGTCCGTCACATGCACT | | WLGVIWGSETTYYNSALKSRLTII | |
| | GTCTCAGGGGTCTCATTACCCGA | | KDNSKSQVFLKMNSLQTDDTAIY | |
| | CTATGGTGTAAGCTGGATTCGCC | | YCAKHYYYGGSYAMDYWGQGT | |
| | AGCCTCCACGAAAGGGTCTGGAG | | SVTVSS | |
| | TGGCTGGGAGTAATATGGGGTAG | | | |
| | TGAAACCACATACTATAATTCAGC | | | |
| | TCTCAAATCCAGACTGACCATCAT | | | |
| | CAAGGACAACTCCAAGAGCCAAG | | | |
| | TTTTCTTAAAAATGAACAGTCTGC | | | |
| | AAACTGATGACACAGCCATTTACT | | | |
| | ACTGTGCCAAACATTATTACTACG | | | |
| | GTGGTAGCTATGCTATGGACTACT | | | |
| | GGGGTCAAGGAACCTCAGTCACC | | | |
| | GTCTCCTCA | | | |
| Linker | GGATCC | 1451 | GS | 1452 |
| CD34 | GAACTTCCTACTCAGGGGACTTTC | 1453 | ELPTQGTFSNVSTNVS | 1454 |
| epitope | TCAAACGTTAGCACAAACGTAAGT | | | |
| CD8 | CCCGCCCCAAGACCCCCCACACC | 1455 | PAPRPPTPAPTIASQPLSLRPEAC | 1456 |
| stalk | TGCGCCGACCATTGCTTCTCAAC | | RPAAGGAVHTRGLDFACD | |
| | CCCTGAGTTTGAGACCCGAGGCC | | | |
| | TGCCGGCCAGCTGCCGGCGGGG | | | |
| | CCGTGCATACAAGAGGACTCGAT | | | |
| | TTCGCTTGCGAC | | | |
| CD8 | ATCTATATCTGGGCACCTCTCGCT | 1457 | IYIWAPLAGTCGVLLLSLVITLYCN | 1458 |
| trans- | GGCACCTGTGGAGTCCTTCTGCT | | HRNRRRVCKCPR | |
| membrane | CAGCCTGGTTATTACTCTGTACTG | | | |
| | TAATCACCGGAATCGCCGCCGCG | | | |
| | TTTGTAAGTGTCCCAGG | | | |
| Linker | GTCGAC | 1459 | VD | 1460 |
| CD3ζ | AGAGTGAAGTTCAGCAGGAGCGC | 1461 | RVKFSRSADAPAYQQGQNQLYN | 1462 |
| | AGACGCCCCCGCGTACCAGCAG | | ELNLGRREEYDVLDKRRGRDPE | |
| | GGCCAGAACCAGCTCTATAACGA | | MGGKPRRKNPQEGLYNELQKDK | |
| | GCTCAATCTAGGACGAAGAGAGG | | MAEAYSEIGMKGERRRGKGHDG | |
| | AGTACGATGTTTTGGACAAGAGA | | LYQGLSTATKDTYDALHMQALPP | |
| | CGTGGCCGGGACCCTGAGATGG | | R | |
| | GGGGAAAGCCGAGAAGGAAGAA | | | |
| | CCCTCAGGAAGGCCTGTACAATG | | | |
| | AACTGCAGAAAGATAAGATGGCG | | | |
| | GAGGCCTACAGTGAGATTGGGAT | | | |
| | GAAAGGCGAGCGCCGGAGGGGC | | | |
| | AAGGGGCACGATGGCCTTTACCA | | | |
| | GGGTCTCAGTACAGCCACCAAGG | | | |
| | ACACCTACGACGCCCTTCACATG | | | |
| | CAAGCTCTTCCACCTCGT | | | |
| P2A | GCTACTAACTTCAGCCTGCTGAA | 1463 | ATNFSLLKQAGDVEENPGP | 1464 |
| | GCAGGCTGGAGACGTGGAGGAG | | | |
| | AACCCCGGGCCT | | | |
| MyD88 | ATGGCTGCAGGAGGTCCCGGCG | 1465 | MAAGGPGAGSAAPVSSTSSLPLA | 1466 |
| | CGGGGTCTGCGGCCCCGGTCTC | | ALNMRVRRRLSLFLNVRTQVAAD | |
| | CTCCACATCCTCCCTTCCCCTGG | | WTALAEEMDFEYLEIRQLETQAD | |
| | CTGCTCTCAACATGCGAGTGCGG | | PTGRLLDAWQGRPGASVGRLLD | |
| | CGCCGCCTGTCTCTGTTCTTGAA | | LLTKLGRDDVLLELGPSIEEDCQK | |
| | CGTGCGGACACAGGTGGCGGCC | | YILKQQQEEAEKPLQVAAVDSSV | |
| | GACTGGACCGCGCTGGCGGAGG | | PRTAELAGITTLDDPLGHMPERF | |
| | AGATGGACTTTGAGTACTTGGAG | | DAFICYCPSDI | |
| | ATCCGGCAACTGGAGACACAAGC | | | |
| | GGACCCCACTGGCAGGCTGCTG | | | |
| | GACGCCTGGCAGGGACGCCCTG | | | |
| | GCGCCTCTGTAGGCCGACTGCTC | | | |
| | GATCTGCTTACCAAGCTGGGCCG | | | |
| | CGACGACGTGCTGCTGGAGCTGG | | | |
| | GACCCAGCATTGAGGAGGATTGC | | | |
| | CAAAAGTATATCTTGAAGCAGCAG | | | |
| | CAGGAGGAGGCTGAGAAGCCTTT | | | |
| | ACAGGTGGCCGCTGTAGACAGCA | | | |
| | GTGTCCCACGGACAGCAGAGCTG | | | |
| | GCGGGCATCACCACACTTGATGA | | | |
| | CCCCCTGGGGCATATGCCTGAGC | | | |
| | GTTTCGATGCCTTCATCTGCTATT | | | |
| | GCCCCAGCGACATC | | | |
| Linker | GTCGAG | 1467 | VE | 1468 |
| CD40 | AAAAAGGTGGCCAAGAAGCCAAC | 1469 | KKVAKKPTNKAPHPKQEPQEINF | 1470 |
| | CAATAAGGCCCCCCACCCCAAGC | | PDDLPGSNTAAPVQETLHGCQP | |
| | AGGAGCCCCAGGAGATCAATTTT | | VTQEDGKESRISVQERQ | |
| | CCCGACGATCTTCCTGGCTCCAA | | | |
| | CACTGCTGCTCCAGTGCAGGAGA | | | |
| | CTTTACATGGATGCCAACCGGTC | | | |
| | ACCCAGGAGGATGGCAAAGAGAG | | | |
| | TCGCATCTCAGTGCAGGAGAGAC | | | |
| | AG | | | |

Appendix 14: pBP1433-pSFG-Fv-Fv-MC-T2A-αCD19.Q.CD8stm.ζ

| | | SEQ | | SEQ |
|---|---|---|---|---|
| | | ID | | ID |
| Fragment | Nucleotide | NO: | Peptide | NO: |
| FKBP_{V}′ | GGCGTCCAAGTCGAAACCATTAG | 1471 | GVQVETISPGDGRTFPKRGQTCV | 1472 |
| | TCCCGGCGATGGCAGAACATTTC | | VHYTGMLEDGKKVDSSRDRNKP | |
| | CTAAAAGGGGACAAACATGTGTC | | FKFMLGKQEVIRGWEEGVAQMS | |
| | GTCCATTATACAGGCATGTTGGA | | VGQRAKLTISPDYAYGATGHPGII | |
| | GGACGGCAAAAAGGTGGACAGTA | | PPHATLVFDVELLKLE | |
| | GTAGAGATCGCAATAAACCTTTCA | | | |
| | AATTCATGTTGGGAAAACAAGAAG | | | |
| | TCATTAGGGGATGGGAGGAGGGC | | | |
| | GTGGCTCAAATGTCCGTCGGCCA | | | |
| | ACGCGCTAAGCTCACCATCAGCC | | | |
| | CCGACTACGCATACGGCGCTACC | | | |
| | GGACATCCCGGAATTATTCCCCC | | | |
| | TCACGCTACCTTGGTGTTTGACGT | | | |
| | CGAACTGTTGAAGCTCGAA | | | |
| Linker | GTCGAG | 1473 | VE | 1474 |
| FKBP_{V} | GGAGTGCAGGTGGAGACTATCTC | 1475 | GVQVETISPGDGRTFPKRGQTCV | 1476 |
| | CCCAGGAGACGGGCGCACCTTCC | | VHYTGMLEDGKKVDSSRDRNKP | |
| | CCAAGCGCGGCCAGACCTGCGT | | FKFMLGKQEVIRGWEEGVAQMS | |
| | GGTGCACTACACCGGGATGCTTG | | VGQRAKLTISPDYAYGATGHPGII | |
| | AAGATGGAAAGAAAGTTGATTCCT | | PPHATLVFDVELLKLE | |
| | CCCGGGACAGAAACAAGCCCTTT | | | |
| | AAGTTTATGCTAGGCAAGCAGGA | | | |
| | GGTGATCCGAGGCTGGGAAGAAG | | | |
| | GGGTTGCCCAGATGAGTGTGGGT | | | |
| | CAGAGAGCCAAACTGACTATATCT | | | |
| | CCAGATTATGCCTATGGTGCCACT | | | |
| | GGGCACCCAGGCATCATCCCACC | | | |
| | ACATGCCACTCTCGTCTTCGATGT | | | |
| | GGAGCTTCTAAAACTGGAA | | | |
| MyD88 | ATGGCTGCAGGAGGTCCCGGCG | 1477 | MAAGGPGAGSAAPVSSTSSLPLA | 1478 |
| | CGGGGTCTGCGGCCCCGGTCTC | | ALNMRVRRRLSLFLNVRTQVAAD | |
| | CTCCACATCCTCCCTTCCCCTGG | | WTALAEEMDFEYLEIRQLETQAD | |
| | CTGCTCTCAACATGCGAGTGCGG | | PTGRLLDAWQGRPGASVGRLLD | |
| | CGCCGCCTGTCTCTGTTCTTGAA | | LLTKLGRDDVLLELGPSIEEDCQK | |
| | CGTGCGGACACAGGTGGCGGCC | | YILKQQQEEAEKPLQVAAVDSSV | |
| | GACTGGACCGCGCTGGCGGAGG | | PRTAELAGITTLDDPLGHMPERF | |
| | AGATGGACTTTGAGTACTTGGAG | | DAFICYCPSDI | |
| | ATCCGGCAACTGGAGACACAAGC | | | |
| | GGACCCCACTGGCAGGCTGCTG | | | |
| | GACGCCTGGCAGGGACGCCCTG | | | |
| | GCGCCTCTGTAGGCCGACTGCTC | | | |
| | GATCTGCTTACCAAGCTGGGCCG | | | |
| | CGACGACGTGCTGCTGGAGCTGG | | | |
| | GACCCAGCATTGAGGAGGATTGC | | | |
| | CAAAAGTATATCTTGAAGCAGCAG | | | |
| | CAGGAGGAGGCTGAGAAGCCTTT | | | |
| | ACAGGTGGCCGCTGTAGACAGCA | | | |
| | GTGTCCCACGGACAGCAGAGCTG | | | |
| | GCGGGCATCACCACACTTGATGA | | | |
| | CCCCCTGGGGCATATGCCTGAGC | | | |
| | GTTTCGATGCCTTCATCTGCTATT | | | |
| | GCCCCAGCGACATC | | | |
| Linker | GTCGAG | 1479 | VE | 1480 |
| CD40 | AAAAAGGTGGCCAAGAAGCCAAC | 1481 | KKVAKKPTNKAPHPKQEPQEINF | 1482 |
| | CAATAAGGCCCCCCACCCCAAGC | | PDDLPGSNTAAPVQETLHGCQP | |
| | AGGAGCCCCAGGAGATCAATTTT | | VTQEDGKESRISVQERQ | |
| | CCCGACGATCTTCCTGGCTCCAA | | | |
| | CACTGCTGCTCCAGTGCAGGAGA | | | |
| | CTTTACATGGATGCCAACCGGTC | | | |
| | ACCCAGGAGGATGGCAAAGAGAG | | | |
| | TCGCATCTCAGTGCAGGAGAGAC | | | |
| | AG | | | |
| Linker | GGATCTGGACCGCGG | 1483 | GSGPR | 1484 |
| T2A | GAAGGCCGAGGGAGCCTGCTGA | 1485 | EGRGSLLTCGDVEENPGP | 1486 |
| | CATGTGGCGATGTGGAGGAAAAC | | | |
| | CCAGGACCA | | | |
| Linker | CCACGG | 1487 | PR | 1488 |
| Signal | ATGGAGTTTGGACTTTCTTGGTTG | 1489 | MEFGLSVVLFLVAILKGVQCSR | 1490 |
| Peptide | TTTTTGGTGGCAATTCTGAAGGGT | | | |
| | GTCCAGTGTAGCAGG | | | |
| FMC63 VL | GACATCCAGATGACACAGACTAC | 1491 | DIQMTQTTSSLSASLGDRVTISCR | 1492 |
| | ATCCTCCCTGTCTGCCTCTCTGG | | ASQDISKYLNVVYQQKPDGTVKLL | |
| | GAGACAGAGTCACCATCAGTTGC | | IYHTSRLHSGVPSRFSGSGSGTD | |
| | AGGGCAAGTCAGGACATTAGTAA | | YSLTISNLEQEDIATYFCQQGNTL | |
| | ATATTTAAATTGGTATCAGCAGAA | | PYTFGGGTKLEIT | |
| | ACCAGATGGAACTGTTAAACTCCT | | | |
| | GATCTACCATACATCAAGATTACA | | | |
| | CTCAGGAGTCCCATCAAGGTTCA | | | |
| | GTGGCAGTGGGTCTGGAACAGAT | | | |
| | TATTCTCTCACCATTAGCAACCTG | | | |
| | GAGCAAGAAGATATTGCCACTTAC | | | |
| | TTTTGCCAACAGGGTAATACGCTT | | | |
| | CCGTACACGTTCGGAGGGGGGA | | | |
| | CTAAGTTGGAAATAACA | | | |
| Flex | GGCGGAGGAAGCGGAGGTGGGG | 1493 | GGGSGGGG | 1494 |
| | GC | | | |
| FMC63 VH | GAGGTGAAACTGCAGGAGTCAGG | 1495 | EVKLQESGPGLVAPSQSLSVTCT | 1496 |
| | ACCTGGCCTGGTGGCGCCCTCAC | | VSGVSLPDYGVSWIRQPPRKGLE | |
| | AGAGCCTGTCCGTCACATGCACT | | WLGVIWGSETTYYNSALKSRLTII | |
| | GTCTCAGGGGTCTCATTACCCGA | | KDNSKSQVFLKMNSLQTDDTAIY | |
| | CTATGGTGTAAGCTGGATTCGCC | | YCAKHYYYGGSYAMDYWGQGT | |
| | AGCCTCCACGAAAGGGTCTGGAG | | SVTVSS | |
| | TGGCTGGGAGTAATATGGGGTAG | | | |
| | TGAAACCACATACTATAATTCAGC | | | |
| | TCTCAAATCCAGACTGACCATCAT | | | |
| | CAAGGACAACTCCAAGAGCCAAG | | | |
| | TTTTCTTAAAAATGAACAGTCTGC | | | |
| | AAACTGATGACACAGCCATTTACT | | | |
| | ACTGTGCCAAACATTATTACTACG | | | |
| | GTGGTAGCTATGCTATGGACTACT | | | |
| | GGGGTCAAGGAACCTCAGTCACC | | | |
| | GTCTCCTCA | | | |
| Linker | GGATCC | 1497 | GS | 1498 |
| CD34 | GAACTTCCTACTCAGGGGACTTTC | 1499 | ELPTQGTFSNVSTNVS | 1500 |
| epitope | TCAAACGTTAGCACAAACGTAAGT | | | |
| CD8 stalk | CCCGCCCCAAGACCCCCCACACC | 1501 | PAPRPPTPAPTIASQPLSLRPEAC | 1502 |
| | TGCGCCGACCATTGCTTCTCAAC | | RPAAGGAVHTRGLDFACD | |
| | CCCTGAGTTTGAGACCCGAGGCC | | | |
| | TGCCGGCCAGCTGCCGGCGGGG | | | |
| | CCGTGCATACAAGAGGACTCGAT | | | |
| | TTCGCTTGCGAC | | | |
| CD8 | ATCTATATCTGGGCACCTCTCGCT | 1503 | IYIWAPLAGTCGVLLLSLVITLYCN | 1504 |
| trans- | GGCACCTGTGGAGTCCTTCTGCT | | HRNRRRVCKCPR | |
| membrane | CAGCCTGGTTATTACTCTGTACTG | | | |
| | TAATCACCGGAATCGCCGCCGCG | | | |
| | TTTGTAAGTGTCCCAGG | | | |
| Linker | GTCGAC | 1505 | VD | 1506 |
| CD3ζ | AGAGTGAAGTTCAGCAGGAGCGC | 1507 | RVKFSRSADAPAYQQGQNQLYN | 1508 |
| | AGACGCCCCCGCGTACCAGCAG | | ELNLGRREEYDVLDKRRGRDPE | |
| | GGCCAGAACCAGCTCTATAACGA | | MGGKPRRKNPQEGLYNELQKDK | |
| | GCTCAATCTAGGACGAAGAGAGG | | MAEAYSEIGMKGERRRGKGHDG | |
| | AGTACGATGTTTTGGACAAGAGA | | LYQGLSTATKDTYDALHMQALPP | |
| | CGTGGCCGGGACCCTGAGATGG | | R | |
| | GGGGAAAGCCGAGAAGGAAGAA | | | |
| | CCCTCAGGAAGGCCTGTACAATG | | | |
| | AACTGCAGAAAGATAAGATGGCG | | | |
| | GAGGCCTACAGTGAGATTGGGAT | | | |
| | GAAAGGCGAGCGCCGGAGGGGC | | | |
| | AAGGGGCACGATGGCCTTTACCA | | | |
| | GGGTCTCAGTACAGCCACCAAGG | | | |
| | ACACCTACGACGCCCTTCACATG | | | |
| | CAAGCTCTTCCACCTCGT | | | |

Appendix 15: pBP1439-pSFG-MC.FKBPᵥ-T2A-αCD19.Q.CD8stm.ζ

| | | SEQ | | SEQ |
|---|---|---|---|---|
| | | ID | | ID |
| Fragment | Nucleotide | NO: | Peptide | NO: |
| MyD88 | ATGGCTGCAGGAGGTCCCGGCG | 1509 | MAAGGPGAGSAAPVSSTSSLPLA | 1510 |
| | CGGGGTCTGCGGCCCCGGTCTC | | ALNMRVRRRLSLFLNVRTQVAAD | |
| | CTCCACATCCTCCCTTCCCCTGG | | WTALAEEMDFEYLEIRQLETQAD | |
| | CTGCTCTCAACATGCGAGTGCGG | | PTGRLLDAWQGRPGASVGRLLD | |
| | CGCCGCCTGTCTCTGTTCTTGAA | | LLTKLGRDDVLLELGPSIEEDCQK | |
| | CGTGCGGACACAGGTGGCGGCC | | YlLKQQQEEAEKPLQVAAVDSSV | |
| | GACTGGACCGCGCTGGCGGAGG | | PRTAELAGITTLDDPLGHMPERF | |
| | AGATGGACTTTGAGTACTTGGAG | | DAFICYCPSDI | |
| | ATCCGGCAACTGGAGACACAAGC | | | |
| | GGACCCCACTGGCAGGCTGCTG | | | |
| | GACGCCTGGCAGGGACGCCCTG | | | |
| | GCGCCTCTGTAGGCCGACTGCTC | | | |
| | GATCTGCTTACCAAGCTGGGCCG | | | |
| | CGACGACGTGCTGCTGGAGCTGG | | | |
| | GACCCAGCATTGAGGAGGATTGC | | | |
| | CAAAAGTATATCTTGAAGCAGCAG | | | |
| | CAGGAGGAGGCTGAGAAGCCTTT | | | |
| | ACAGGTGGCCGCTGTAGACAGCA | | | |
| | GTGTCCCACGGACAGCAGAGCTG | | | |
| | GCGGGCATCACCACACTTGATGA | | | |
| | CCCCCTGGGGCATATGCCTGAGC | | | |
| | GTTTCGATGCCTTCATCTGCTATT | | | |
| | GCCCCAGCGACATC | | | |
| Linker | GTCGAG | 1511 | VE | 1512 |
| CD40 | AAAAAGGTGGCCAAGAAGCCAAC | 1513 | KKVAKKPTNKAPHPKQEPQEINF | 1514 |
| | CAATAAGGCCCCCCACCCCAAGC | | PDDLPGSNTAAPVQETLHGCQP | |
| | AGGAGCCCCAGGAGATCAATTTT | | VTQEDGKESRISVQERQ | |
| | CCCGACGATCTTCCTGGCTCCAA | | | |
| | CACTGCTGCTCCAGTGCAGGAGA | | | |
| | CTTTACATGGATGCCAACCGGTC | | | |
| | ACCCAGGAGGATGGCAAAGAGAG | | | |
| | TCGCATCTCAGTGCAGGAGAGAC | | | |
| | AG | | | |
| Linker | GTCGAG | 1515 | VE | 1516 |
| FKBPv | GGAGTGCAGGTGGAGACTATTAG | 1517 | GVQVETISPGDGRTFPKRGQTCV | 1518 |
| | CCCCGGAGATGGCAGAACATTCC | | VHYTGMLEDGKKVDSSRDRNKP | |
| | CCAAAAGAGGACAGACTTGCGTC | | FKFMLGKQEVIRGWEEGVAQMS | |
| | GTGCATTATACTGGAATGCTGGAA | | VGQRAKLTISPDYAYGATGHPGII | |
| | GACGGCAAGAAGGTGGACAGCA | | PPHATLVFDVELLKLE | |
| | GCCGGGACCGAAACAAGCCCTTC | | | |
| | AAGTTCATGCTGGGGAAGCAGGA | | | |
| | AGTGATCCGGGGCTGGGAGGAA | | | |
| | GGAGTCGCACAGATGTCAGTGGG | | | |
| | ACAGAGGGCCAAACTGACTATTA | | | |
| | GCCCAGACTACGCTTATGGAGCA | | | |
| | ACCGGCCACCCCGGGATCATTCC | | | |
| | CCCTCATGCTACACTGGTCTTCGA | | | |
| | TGTGGAGCTGCTGAAGCTGGAA | | | |
| Linker | GGATCTGGACCGCGG | 1519 | GSGPR | 1520 |
| T2A | GAAGGCCGAGGGAGCCTGCTGA | 1521 | EGRGSLLTCGDVEENPGP | 1522 |
| | CATGTGGCGATGTGGAGGAAAAC | | | |
| | CCAGGACCA | | | |
| Linker | CCACGG | 1523 | PR | 1524 |
| Signal | ATGGAGTTTGGACTTTCTTGGTTG | 1525 | MEFGLSVVLFLVAILKGVQCSR | 1526 |
| Peptide | TTTTTGGTGGCAATTCTGAAGGGT | | | |
| | GTCCAGTGTAGCAGG | | | |
| FMC63 VL | GACATCCAGATGACACAGACTAC | 1527 | DIQMTQTTSSLSASLGDRVTISCR | 1528 |
| | ATCCTCCCTGTCTGCCTCTCTGG | | ASQDISKYLNVVYQQKPDGTVKLL | |
| | GAGACAGAGTCACCATCAGTTGC | | IYHTSRLHSGVPSRFSGSGSGTD | |
| | AGGGCAAGTCAGGACATTAGTAA | | YSLTISNLEQEDIATYFCQQGNTL | |
| | ATATTTAAATTGGTATCAGCAGAA | | PYTFGGGTKLEIT | |
| | ACCAGATGGAACTGTTAAACTCCT | | | |
| | GATCTACCATACATCAAGATTACA | | | |
| | CTCAGGAGTCCCATCAAGGTTCA | | | |
| | GTGGCAGTGGGTCTGGAACAGAT | | | |
| | TATTCTCTCACCATTAGCAACCTG | | | |
| | GAGCAAGAAGATATTGCCACTTAC | | | |
| | TTTTGCCAACAGGGTAATACGCTT | | | |
| | CCGTACACGTTCGGAGGGGGGA | | | |
| | CTAAGTTGGAAATAACA | | | |
| Flex | GGCGGAGGAAGCGGAGGTGGGG | 1529 | GGGSGGGG | 1530 |
| | GC | | | |
| FMC63 VH | GAGGTGAAACTGCAGGAGTCAGG | 1531 | EVKLQESGPGLVAPSQSLSVTCT | 1532 |
| | ACCTGGCCTGGTGGCGCCCTCAC | | VSGVSLPDYGVSWIRQPPRKGLE | |
| | AGAGCCTGTCCGTCACATGCACT | | WLGVIWGSETTYYNSALKSRLTII | |
| | GTCTCAGGGGTCTCATTACCCGA | | KDNSKSQVFLKMNSLQTDDTAIY | |
| | CTATGGTGTAAGCTGGATTCGCC | | YCAKHYYYGGSYAMDYWGQGT | |
| | AGCCTCCACGAAAGGGTCTGGAG | | SVTVSS | |
| | TGGCTGGGAGTAATATGGGGTAG | | | |
| | TGAAACCACATACTATAATTCAGC | | | |
| | TCTCAAATCCAGACTGACCATCAT | | | |
| | CAAGGACAACTCCAAGAGCCAAG | | | |
| | TTTTCTTAAAAATGAACAGTCTGC | | | |
| | AAACTGATGACACAGCCATTTACT | | | |
| | ACTGTGCCAAACATTATTACTACG | | | |
| | GTGGTAGCTATGCTATGGACTACT | | | |
| | GGGGTCAAGGAACCTCAGTCACC | | | |
| | GTCTCCTCA | | | |
| Linker | GGATCC | 1533 | GS | 1534 |
| CD34 | GAACTTCCTACTCAGGGGACTTTC | 1535 | ELPTQGTFSNVSTNVS | 1536 |
| epitope | TCAAACGTTAGCACAAACGTAAGT | | | |
| CD8 | CCCGCCCCAAGACCCCCCACACC | 1537 | PAPRPPTPAPTIASQPLSLRPEAC | 1538 |
| stalk | TGCGCCGACCATTGCTTCTCAAC | | RPAAGGAVHTRGLDFACD | |
| | CCCTGAGTTTGAGACCCGAGGCC | | | |
| | TGCCGGCCAGCTGCCGGCGGGG | | | |
| | CCGTGCATACAAGAGGACTCGAT | | | |
| | TTCGCTTGCGAC | | | |
| CD8 | ATCTATATCTGGGCACCTCTCGCT | 1539 | IYIWAPLAGTCGVLLLSLVITLYCN | 1540 |
| trans- | GGCACCTGTGGAGTCCTTCTGCT | | HRNRRRVCKCPR | |
| membrane | CAGCCTGGTTATTACTCTGTACTG | | | |
| | TAATCACCGGAATCGCCGCCGCG | | | |
| | TTTGTAAGTGTCCCAGG | | | |
| Linker | GTCGAC | 1541 | VD | 1542 |
| CD3ζ | AGAGTGAAGTTCAGCAGGAGCGC | 1543 | RVKFSRSADAPAYQQGQNQLYN | 1544 |
| | AGACGCCCCCGCGTACCAGCAG | | ELNLGRREEYDVLDKRRGRDPE | |
| | GGCCAGAACCAGCTCTATAACGA | | MGGKPRRKNPQEGLYNELQKDK | |
| | GCTCAATCTAGGACGAAGAGAGG | | MAEAYSEIGMKGERRRGKGHDG | |
| | AGTACGATGTTTTGGACAAGAGA | | LYQGLSTATKDTYDALHMQALPP | |
| | CGTGGCCGGGACCCTGAGATGG | | R | |
| | GGGGAAAGCCGAGAAGGAAGAA | | | |
| | CCCTCAGGAAGGCCTGTACAATG | | | |
| | AACTGCAGAAAGATAAGATGGCG | | | |
| | GAGGCCTACAGTGAGATTGGGAT | | | |
| | GAAAGGCGAGCGCCGGAGGGGC | | | |
| | AAGGGGCACGATGGCCTTTACCA | | | |
| | GGGTCTCAGTACAGCCACCAAGG | | | |
| | ACACCTACGACGCCCTTCACATG | | | |
| | CAAGCTCTTCCACCTCGT | | | |

Appendix 16: pBP1440-pSFG-FKBPv.ΔC9.T2A-αCD19.Q.CD8stm.ζ.T2A.P2A-MC.FKBP_{wt}.FRB_{L}

| | | SEQ | | SEQ |
|---|---|---|---|---|
| | | ID | | ID |
| Fragment | Nucleotide | NO: | Peptide | NO: |
| MyD88 | ATGGCTGCAGGAGGTCCCGGCG | 1545 | MAAGGPGAGSAAPVSSTSSLPLA | 1546 |
| | CGGGGTCTGCGGCCCCGGTCTC | | ALNMRVRRRLSLFLNVRTQVAAD | |
| | CTCCACATCCTCCCTTCCCCTGG | | WTALAEEMDFEYLEIRQLETQAD | |
| | CTGCTCTCAACATGCGAGTGCGG | | PTGRLLDAWQGRPGASVGRLLD | |
| | CGCCGCCTGTCTCTGTTCTTGAA | | LLTKLGRDDVLLELGPSIEEDCQK | |
| | CGTGCGGACACAGGTGGCGGCC | | YILKQQQEEAEKPLQVAAVDSSV | |
| | GACTGGACCGCGCTGGCGGAGG | | PRTAELAGITTLDDPLGHMPERF | |
| | AGATGGACTTTGAGTACTTGGAG | | DAFICYCPSDI | |
| | ATCCGGCAACTGGAGACACAAGC | | | |
| | GGACCCCACTGGCAGGCTGCTG | | | |
| | GACGCCTGGCAGGGACGCCCTG | | | |
| | GCGCCTCTGTAGGCCGACTGCTC | | | |
| | GATCTGCTTACCAAGCTGGGCCG | | | |
| | CGACGACGTGCTGCTGGAGCTGG | | | |
| | GACCCAGCATTGAGGAGGATTGC | | | |
| | CAAAAGTATATCTTGAAGCAGCAG | | | |
| | CAGGAGGAGGCTGAGAAGCCTTT | | | |
| | ACAGGTGGCCGCTGTAGACAGCA | | | |
| | GTGTCCCACGGACAGCAGAGCTG | | | |
| | GCGGGCATCACCACACTTGATGA | | | |
| | CCCCCTGGGGCATATGCCTGAGC | | | |
| | GTTTCGATGCCTTCATCTGCTATT | | | |
| | GCCCCAGCGACATC | | | |
| Linker | GTCGAG | 1547 | VE | 1548 |
| CD40 | AAAAAGGTGGCCAAGAAGCCAAC | 1549 | KKVAKKPTNKAPHPKQEPQEINF | 1550 |
| | CAATAAGGCCCCCCACCCCAAGC | | PDDLPGSNTAAPVQETLHGCQP | |
| | AGGAGCCCCAGGAGATCAATTTT | | VTQEDGKESRISVQERQ | |
| | CCCGACGATCTTCCTGGCTCCAA | | | |
| | CACTGCTGCTCCAGTGCAGGAGA | | | |
| | CTTTACATGGATGCCAACCGGTC | | | |
| | ACCCAGGAGGATGGCAAAGAGAG | | | |
| | TCGCATCTCAGTGCAGGAGAGAC | | | |
| | AG | | | |
| Linker | GTCGAG | 1551 | VE | 1552 |
| FKBP_{WT}′ | GGCGTCCAAGTCGAAACCATTAG | 1553 | GVQVETISPGDGRTFPKRGQTCV | 1554 |
| | TCCCGGCGATGGCAGAACATTTC | | VHYTGMLEDGKKFDSSRDRNKP | |
| | CTACAAGGGGACAAACATGTGTC | | FKFMLGKQEVIRGWEEGVAQMS | |
| | GTCCATTATACAGGCATGTTGGA | | VGQRAKLTISPDYAYGATGHPGII | |
| | GGACGGCAAAAAGTTCGACAGTA | | PPHATLVFDVELLKLE | |
| | GTAGAGATCGCAATAAACCTTTCA | | | |
| | AATTCATGTTGGGAAAACAAGAAG | | | |
| | TCATTAGGGGATGGGAGGAGGGC | | | |
| | GTGGCTCAAATGTCCGTCGGCCA | | | |
| | ACGCGCTAAGCTCACCATCAGCC | | | |
| | CCGACTACGCATACGGCGCTACC | | | |
| | GGACATCCCGGAATTATTCCCCC | | | |
| | TCACGCTACCTTGGTGTTTGACGT | | | |
| | CGAACTGTTGAAGCTCGAA | | | |
| Linker | GTCGAG | 1555 | VE | 1556 |
| FRB_{L} | CAATTGGAAATGTGGCATGAAGG | 1557 | QLEMWHEGLEEASRLYFGERNV | 1558 |
| | GTTGGAAGAAGCTTCAAGGCTGT | | KGMFEVLEPLHAMMERGPQTLK | |
| | ACTTCGGAGAGAGGAACGTGAAG | | ETSFNQAYGRDLMEAQEWCRKY | |
| | GGCATGTTTGAGGTTCTTGAACCT | | MKSGNVKDLLQAVVDLYYHVFRRI | |
| | CTGCACGCCATGATGGAACGGGG | | SK | |
| | ACCGCAGACACTGAAAGAAACCT | | | |
| | CTTTTAATCAGGCCTACGGCAGA | | | |
| | GACCTGATGGAGGCCCAAGAATG | | | |
| | GTGTAGAAAGTATATGAAATCCGG | | | |
| | TAACGTGAAAGACCTGCTCCAGG | | | |
| | CCTGGGACCTTTATTACCATGTGT | | | |
| | TCAGGCGGATCAGTAAG | | | |
| Linker | GGCTCAGGT | 1559 | GSG | 1560 |
| T2A | GAAGGCCGAGGGAGCCTGCTGA | 1561 | EGRGSLLTCGDVEENPGP | 1562 |
| | CATGTGGCGATGTGGAGGAAAAC | | | |
| | CCAGGACCA | | | |
| Linker | CCACGG | 1563 | PR | 1564 |
| Signal | ATGGAGTTTGGACTTTCTTGGTTG | 1565 | MEFGLSVVLFLVAILKGVQCSR | 1566 |
| Peptide | TTTTTGGTGGCAATTCTGAAGGGT | | | |
| | GTCCAGTGTAGCAGG | | | |
| FMC63 VL | GACATCCAGATGACACAGACTAC | 1567 | DIQMTQTTSSLSASLGDRVTISCR | 1568 |
| | ATCCTCCCTGTCTGCCTCTCTGG | | ASQDISKYLNVVYQQKPDGTVKLL | |
| | GAGACAGAGTCACCATCAGTTGC | | IYHTSRLHSGVPSRFSGSGSGTD | |
| | AGGGCAAGTCAGGACATTAGTAA | | YSLTISNLEQEDIATYFCQQGNTL | |
| | ATATTTAAATTGGTATCAGCAGAA | | PYTFGGGTKLEIT | |
| | ACCAGATGGAACTGTTAAACTCCT | | | |
| | GATCTACCATACATCAAGATTACA | | | |
| | CTCAGGAGTCCCATCAAGGTTCA | | | |
| | GTGGCAGTGGGTCTGGAACAGAT | | | |
| | TATTCTCTCACCATTAGCAACCTG | | | |
| | GAGCAAGAAGATATTGCCACTTAC | | | |
| | TTTTGCCAACAGGGTAATACGCTT | | | |
| | CCGTACACGTTCGGAGGGGGGA | | | |
| | CTAAGTTGGAAATAACA | | | |
| Flex | GGCGGAGGAAGCGGAGGTGGGG | 1569 | GGGSGGGG | 1570 |
| | GC | | | |
| FMC63 VH | GAGGTGAAACTGCAGGAGTCAGG | 1571 | EVKLQESGPGLVAPSQSLSVTCT | 1572 |
| | ACCTGGCCTGGTGGCGCCCTCAC | | VSGVSLPDYGVSWIRQPPRKGLE | |
| | AGAGCCTGTCCGTCACATGCACT | | WLGVIWGSETTYYNSALKSRLTII | |
| | GTCTCAGGGGTCTCATTACCCGA | | KDNSKSQVFLKMNSLQTDDTAIY | |
| | CTATGGTGTAAGCTGGATTCGCC | | YCAKHYYYGGSYAMDYWGQGT | |
| | AGCCTCCACGAAAGGGTCTGGAG | | SVTVSS | |
| | TGGCTGGGAGTAATATGGGGTAG | | | |
| | TGAAACCACATACTATAATTCAGC | | | |
| | TCTCAAATCCAGACTGACCATCAT | | | |
| | CAAGGACAACTCCAAGAGCCAAG | | | |
| | TTTTCTTAAAAATGAACAGTCTGC | | | |
| | AAACTGATGACACAGCCATTTACT | | | |
| | ACTGTGCCAAACATTATTACTACG | | | |
| | GTGGTAGCTATGCTATGGACTACT | | | |
| | GGGGTCAAGGAACCTCAGTCACC | | | |
| | GTCTCCTCA | | | |
| Linker | GGATCC | 1573 | GS | 1574 |
| CD34 | GAACTTCCTACTCAGGGGACTTTC | 1575 | ELPTQGTFSNVSTNVS | 1576 |
| epitope | TCAAACGTTAGCACAAACGTAAGT | | | |
| CD8 stalk | CCCGCCCCAAGACCCCCCACACC | 1577 | PAPRPPTPAPTIASQPLSLRPEAC | 1578 |
| | TGCGCCGACCATTGCTTCTCAAC | | RPAAGGAVHTRGLDFACD | |
| | CCCTGAGTTTGAGACCCGAGGCC | | | |
| | TGCCGGCCAGCTGCCGGCGGGG | | | |
| | CCGTGCATACAAGAGGACTCGAT | | | |
| | TTCGCTTGCGAC | | | |
| CD8 | ATCTATATCTGGGCACCTCTCGCT | 1579 | IYIWAPLAGTCGVLLLSLVITLYCN | 1580 |
| trans- | GGCACCTGTGGAGTCCTTCTGCT | | HRNRRRVCKCPR | |
| membrane | CAGCCTGGTTATTACTCTGTACTG | | | |
| | TAATCACCGGAATCGCCGCCGCG | | | |
| | TTTGTAAGTGTCCCAGG | | | |
| Linker | GTCGAC | 1581 | VD | 1582 |
| CD3ζ | AGAGTGAAGTTCAGCAGGAGCGC | 1583 | RVKFSRSADAPAYQQGQNQLYN | 1584 |
| | AGACGCCCCCGCGTACCAGCAG | | ELNLGRREEYDVLDKRRGRDPE | |
| | GGCCAGAACCAGCTCTATAACGA | | MGGKPRRKNPQEGLYNELQKDK | |
| | GCTCAATCTAGGACGAAGAGAGG | | MAEAYSEIGMKGERRRGKGHDG | |
| | AGTACGATGTTTTGGACAAGAGA | | LYQGLSTATKDTYDALHMQALPP | |
| | CGTGGCCGGGACCCTGAGATGG | | R | |
| | GGGGAAAGCCGAGAAGGAAGAA | | | |
| | CCCTCAGGAAGGCCTGTACAATG | | | |
| | AACTGCAGAAAGATAAGATGGCG | | | |
| | GAGGCCTACAGTGAGATTGGGAT | | | |
| | GAAAGGCGAGCGCCGGAGGGGC | | | |
| | AAGGGGCACGATGGCCTTTACCA | | | |
| | GGGTCTCAGTACAGCCACCAAGG | | | |
| | ACACCTACGACGCCCTTCACATG | | | |
| | CAAGCTCTTCCACCTCGT | | | |
| Linker | ggttccgga | 1585 | GSG | 1586 |
| T2A | GAAGGCCGAGGGAGCCTGCTGA | 1587 | EGRGSLLTCGDVEENPGP | 1588 |
| | CATGTGGCGATGTGGAGGAAAAC | | | |
| | CCAGGACCA | | | |
| Linker | ggatctgga | 1589 | GSG | 1590 |
| P2A | GCAACGAATTTTTCCCTGCTGAAA | 1591 | ATNFSLLKQAGDVEENPGP | 1592 |
| | CAGGCAGGGGACGTAGAGGAAAA | | | |
| | TCCTGGTCCT | | | |
| MyD88 | ATGGCTGCAGGAGGTCCCGGCG | 1593 | MAAGGPGAGSAAPVSSTSSLPLA | 1594 |
| | CGGGGTCTGCGGCCCCGGTCTC | | ALNMRVRRRLSLFLNVRTQVAAD | |
| | CTCCACATCCTCCCTTCCCCTGG | | WTALAEEMDFEYLEIRQLETQAD | |
| | CTGCTCTCAACATGCGAGTGCGG | | PTGRLLDAWQGRPGASVGRLLD | |
| | CGCCGCCTGTCTCTGTTCTTGAA | | LLTKLGRDDVLLELGPSIEEDCQK | |
| | CGTGCGGACACAGGTGGCGGCC | | YILKQQQEEAEKPLQVAAVDSSV | |
| | GACTGGACCGCGCTGGCGGAGG | | PRTAELAGITTLDDPLGHMPERF | |
| | AGATGGACTTTGAGTACTTGGAG | | DAFICYCPSDI | |
| | ATCCGGCAACTGGAGACACAAGC | | | |
| | GGACCCCACTGGCAGGCTGCTG | | | |
| | GACGCCTGGCAGGGACGCCCTG | | | |
| | GCGCCTCTGTAGGCCGACTGCTC | | | |
| | GATCTGCTTACCAAGCTGGGCCG | | | |
| | CGACGACGTGCTGCTGGAGCTGG | | | |
| | GACCCAGCATTGAGGAGGATTGC | | | |
| | CAAAAGTATATCTTGAAGCAGCAG | | | |
| | CAGGAGGAGGCTGAGAAGCCTTT | | | |
| | ACAGGTGGCCGCTGTAGACAGCA | | | |
| | GTGTCCCACGGACAGCAGAGCTG | | | |
| | GCGGGCATCACCACACTTGATGA | | | |
| | CCCCCTGGGGCATATGCCTGAGC | | | |
| | GTTTCGATGCCTTCATCTGCTATT | | | |
| | GCCCCAGCGACATC | | | |
| Linker | GTCGAG | 1595 | VE | 1596 |
| CD40 | AAAAAGGTGGCCAAGAAGCCAAC | 1597 | KKVAKKPTNKAPHPKQEPQEINF | 1598 |
| | CAATAAGGCCCCCCACCCCAAGC | | PDDLPGSNTAAPVQETLHGCQP | |
| | AGGAGCCCCAGGAGATCAATTTT | | VTQEDGKESRISVQERQ | |
| | CCCGACGATCTTCCTGGCTCCAA | | | |
| | CACTGCTGCTCCAGTGCAGGAGA | | | |
| | CTTTACATGGATGCCAACCGGTC | | | |
| | ACCCAGGAGGATGGCAAAGAGAG | | | |
| | TCGCATCTCAGTGCAGGAGAGAC | | | |
| | AG | | | |
| Linker | GTCGAG | 1599 | VE | 1600 |
| Linker | GTCGAG | 1601 | VE | 1602 |
| STOPtail | TCAGGCGGTGGCTCAGGTCCGC | 1603 | SGGGSGPR-STOP | 1604 |
| | GGTGA | | | |

Appendix 17: pBP1460-pSFG-FKBPv.ΔC9.T2A-αCD19.Q.CD8stm.ζ.T2A.P2A-MC.FKBP_{wt}.FRB_{L}

| | | SEQ | | SEQ |
|---|---|---|---|---|
| | | ID | | ID |
| Fragment | Nucleotide | NO: | Peptide | NO: |
| Leader | ATGCTCGAGCAATTGGAG | 1605 | MLEQLE | 1606 |
| peptide | | | | |
| FKBPv | GGAGTGCAGGTGGAGACTATTAG | 1607 | GVQVETISPGDGRTFPKRGQTCV | 1608 |
| | CCCCGGAGATGGCAGAACATTCC | | VHYTGMLEDGKKVDSSRDRNKP | |
| | CCAAAAGAGGACAGACTTGCGTC | | FKFMLGKQEVIRGVVEEGVAQMS | |
| | GTGCATTATACTGGAATGCTGGAA | | VGQRAKLTISPDYAYGATGHPGII | |
| | GACGGCAAGAAGGTGGACAGCA | | PPHATLVFDVELLKLE | |
| | GCCGGGACCGAAACAAGCCCTTC | | | |
| | AAGTTCATGCTGGGGAAGCAGGA | | | |
| | AGTGATCCGGGGCTGGGAGGAA | | | |
| | GGAGTCGCACAGATGTCAGTGGG | | | |
| | ACAGAGGGCCAAACTGACTATTA | | | |
| | GCCCAGACTACGCTTATGGAGCA | | | |
| | ACCGGCCACCCCGGGATCATTCC | | | |
| | CCCTCATGCTACACTGGTCTTCGA | | | |
| | TGTGGAGCTGCTGAAGCTGGAA | | | |
| Linker | TCAGGCGGTGGCTCAGGTGTGGA | 1609 | SGGGSGVD | 1610 |
| | C | | | |
| Δcaspase9 | GGATTTGGTGATGTCGGTGCTCT | 1611 | GFGDVGALESLRGNADLAYILSM | 1612 |
| | TGAGAGTTTGAGGGGAAATGCAG | | EPCGHCLIINNVNFCRESGLRTRT | |
| | ATTTGGCTTACATCCTGAGCATGG | | GSNIDCEKLRRRFSSLHFMVEVK | |
| | AGCCCTGTGGCCACTGCCTCATT | | GDLTAKKMVLALLELARQDHGAL | |
| | ATCAACAATGTGAACTTCTGCCGT | | DCCVVVILSHGCQASHLQFPGAV | |
| | GAGTCCGGGCTCCGCACCCGCA | | YGTDGCPVSVEKIVNIFNGTSCPS | |
| | CTGGCTCCAACATCGACTGTGAG | | LGGKPKLFFIQACGGEQKDHGFE | |
| | AAGTTGCGGCGTCGCTTCTCCTC | | VASTSPEDESPGSNPEPDATPFQ | |
| | GCTGCATTTCATGGTGGAGGTGA | | EGLRTFDQLDAISSLPTPSDIFVS | |
| | AGGGCGACCTGACTGCCAAGAAA | | YSTFPGFVSVVRDPKSGSVVYVET | |
| | ATGGTGCTGGCTTTGCTGGAGCT | | LDDIFEQWAHSEDLQSLLLRVAN | |
| | GGCGCGGCAGGACCACGGTGCT | | AVSVKGIYKQMPGCFNFLRKKLF | |
| | CTGGACTGCTGCGTGGTGGTCAT | | FKTSASRA | |
| | TCTCTCTCACGGCTGTCAGGCCA | | | |
| | GCCACCTGCAGTTCCCAGGGGCT | | | |
| | GTCTACGGCACAGATGGATGCCC | | | |
| | TGTGTCGGTCGAGAAGATTGTGA | | | |
| | ACATCTTCAATGGGACCAGCTGC | | | |
| | CCCAGCCTGGGAGGGAAGCCCA | | | |
| | AGCTCTTTTTCATCCAGGCCTGTG | | | |
| | GTGGGGAGCAGAAAGATCATGGG | | | |
| | TTTGAGGTGGCCTCCACTTCCCC | | | |
| | TGAAGACGAGTCCCCTGGCAGTA | | | |
| | ACCCCGAGCCAGATGCCACCCCG | | | |
| | TTCCAGGAAGGTTTGAGGACCTT | | | |
| | CGACCAGCTGGACGCCATATCTA | | | |
| | GTTTGCCCACACCCAGTGACATC | | | |
| | TTTGTGTCCTACTCTACTTTCCCA | | | |
| | GGTTTTGTTTCCTGGAGGGACCC | | | |
| | CAAGAGTGGCTCCTGGTACGTTG | | | |
| | AGACCCTGGACGACATCTTTGAG | | | |
| | CAGTGGGCTCACTCTGAAGACCT | | | |
| | GCAGTCCCTCCTGCTTAGGGTCG | | | |
| | CTAATGCTGTTTCGGTGAAAGGG | | | |
| | ATTTATAAACAGATGCCTGGTTGC | | | |
| | TTTAATTTCCTCCGGAAAAAACTT | | | |
| | TTCTTTAAAACATCAGCTAGCAGA | | | |
| | GCC | | | |
| Linker | GGATCTGGACCGCGG | 1613 | GSGPR | 1614 |
| T2A | GAAGGCCGAGGGAGCCTGCTGA | 1615 | EGRGSLLTCGDVEENPGP | 1616 |
| | CATGTGGCGATGTGGAGGAAAAC | | | |
| | CCAGGACCA | | | |
| Linker | CCACGG | 1617 | PR | 1618 |
| Signal | ATGGAGTTTGGACTTTCTTGGTTG | 1619 | MEFGLSWLFLVAILKGVQCSR | 1620 |
| Peptide | TTTTTGGTGGCAATTCTGAAGGGT | | | |
| | GTCCAGTGTAGCAGG | | | |
| FMC63 VL | GACATCCAGATGACACAGACTAC | 1621 | DIQMTQTTSSLSASLGDRVTISCR | 1622 |
| | ATCCTCCCTGTCTGCCTCTCTGG | | ASQDISKYLNVVYQQKPDGTVKLL | |
| | GAGACAGAGTCACCATCAGTTGC | | IYHTSRLHSGVPSRFSGSGSGTD | |
| | AGGGCAAGTCAGGACATTAGTAA | | YSLTISNLEQEDIATYFCQQGNTL | |
| | ATATTTAAATTGGTATCAGCAGAA | | PYTFGGGTKLEIT | |
| | ACCAGATGGAACTGTTAAACTCCT | | | |
| | GATCTACCATACATCAAGATTACA | | | |
| | CTCAGGAGTCCCATCAAGGTTCA | | | |
| | GTGGCAGTGGGTCTGGAACAGAT | | | |
| | TATTCTCTCACCATTAGCAACCTG | | | |
| | GAGCAAGAAGATATTGCCACTTAC | | | |
| | TTTTGCCAACAGGGTAATACGCTT | | | |
| | CCGTACACGTTCGGAGGGGGGA | | | |
| | CTAAGTTGGAAATAACA | | | |
| Flex | GGCGGAGGAAGCGGAGGTGGGG | 1623 | GGGSGGGG | 1624 |
| | GC | | | |
| FMC63 VH | GAGGTGAAACTGCAGGAGTCAGG | 1625 | EVKLQESGPGLVAPSQSLSVTCT | 1626 |
| | ACCTGGCCTGGTGGCGCCCTCAC | | VSGVSLPDYGVSWIRQPPRKGLE | |
| | AGAGCCTGTCCGTCACATGCACT | | VVLGVIWGSETTYYNSALKSRLTII | |
| | GTCTCAGGGGTCTCATTACCCGA | | KDNSKSQVFLKMNSLQTDDTAIY | |
| | CTATGGTGTAAGCTGGATTCGCC | | YCAKHYYYGGSYAMDYWGQGT | |
| | AGCCTCCACGAAAGGGTCTGGAG | | SVTVSS | |
| | TGGCTGGGAGTAATATGGGGTAG | | | |
| | TGAAACCACATACTATAATTCAGC | | | |
| | TCTCAAATCCAGACTGACCATCAT | | | |
| | CAAGGACAACTCCAAGAGCCAAG | | | |
| | TTTTCTTAAAAATGAACAGTCTGC | | | |
| | AAACTGATGACACAGCCATTTACT | | | |
| | ACTGTGCCAAACATTATTACTACG | | | |
| | GTGGTAGCTATGCTATGGACTACT | | | |
| | GGGGTCAAGGAACCTCAGTCACC | | | |
| | GTCTCCTCA | | | |
| Linker | GGATCC | 1627 | GS | 1628 |
| CD34 | GAACTTCCTACTCAGGGGACTTTC | 1629 | ELPTQGTFSNVSTNVS | 1630 |
| epitope | TCAAACGTTAGCACAAACGTAAGT | | | |
| CD8 | CCCGCCCCAAGACCCCCCACACC | 1631 | PAPRPPTPAPTIASQPLSLRPEAC | 1632 |
| stalk | TGCGCCGACCATTGCTTCTCAAC | | RPAAGGAVHTRGLDFACD | |
| | CCCTGAGTTTGAGACCCGAGGCC | | | |
| | TGCCGGCCAGCTGCCGGCGGGG | | | |
| | CCGTGCATACAAGAGGACTCGAT | | | |
| | TTCGCTTGCGAC | | | |
| CD8 | ATCTATATCTGGGCACCTCTCGCT | 1633 | IYIWAPLAGTCGVLLLSLVITLYCN | 1634 |
| trans- | GGCACCTGTGGAGTCCTTCTGCT | | HRNRRRVCKCPR | |
| membrane | CAGCCTGGTTATTACTCTGTACTG | | | |
| | TAATCACCGGAATCGCCGCCGCG | | | |
| | TTTGTAAGTGTCCCAGG | | | |
| Linker | GTCGAC | 1635 | VD | 1636 |
| CD3ζ | AGAGTGAAGTTCAGCAGGAGCGC | 1637 | RVKFSRSADAPAYQQGQNQLYN | 1638 |
| | AGACGCCCCCGCGTACCAGCAG | | ELNLGRREEYDVLDKRRGRDPE | |
| | GGCCAGAACCAGCTCTATAACGA | | MGGKPRRKNPQEGLYNELQKDK | |
| | GCTCAATCTAGGACGAAGAGAGG | | MAEAYSEIGMKGERRRGKGHDG | |
| | AGTACGATGTTTTGGACAAGAGA | | LYQGLSTATKDTYDALHMQALPP | |
| | CGTGGCCGGGACCCTGAGATGG | | R | |
| | GGGGAAAGCCGAGAAGGAAGAA | | | |
| | CCCTCAGGAAGGCCTGTACAATG | | | |
| | AACTGCAGAAAGATAAGATGGCG | | | |
| | GAGGCCTACAGTGAGATTGGGAT | | | |
| | GAAAGGCGAGCGCCGGAGGGGC | | | |
| | AAGGGGCACGATGGCCTTTACCA | | | |
| | GGGTCTCAGTACAGCCACCAAGG | | | |
| | ACACCTACGACGCCCTTCACATG | | | |
| | CAAGCTCTTCCACCTCGT | | | |
| Linker | ggttccgga | 1639 | GSG | 1640 |
| T2A | GAAGGCCGAGGGAGCCTGCTGA | 1641 | EGRGSLLTCGDVEENPGP | 1642 |
| | CATGTGGCGATGTGGAGGAAAAC | | | |
| | CCAGGACCA | | | |
| Linker | ggatctgga | 1643 | GSG | 1644 |
| P2A | GCAACGAATTTTTCCCTGCTGAAA | 1645 | ATNFSLLKQAGDVEENPGP | 1646 |
| | CAGGCAGGGGACGTAGAGGAAAA | | | |
| | TCCTGGTCCT | | | |
| MyD88 | ATGGCTGCAGGAGGTCCCGGCG | 1647 | MAAGGPGAGSAAPVSSTSSLPLA | 1648 |
| | CGGGGTCTGCGGCCCCGGTCTC | | ALNMRVRRRLSLFLNVRTQVAAD | |
| | CTCCACATCCTCCCTTCCCCTGG | | WTALAEEMDFEYLEIRQLETQAD | |
| | CTGCTCTCAACATGCGAGTGCGG | | PTGRLLDAWQGRPGASVGRLLD | |
| | CGCCGCCTGTCTCTGTTCTTGAA | | LLTKLGRDDVLLELGPSIEEDCQK | |
| | CGTGCGGACACAGGTGGCGGCC | | YILKQQQEEAEKPLQVAAVDSSV | |
| | GACTGGACCGCGCTGGCGGAGG | | PRTAELAGITTLDDPLGHMPERF | |
| | AGATGGACTTTGAGTACTTGGAG | | DAFICYCPSDI | |
| | ATCCGGCAACTGGAGACACAAGC | | | |
| | GGACCCCACTGGCAGGCTGCTG | | | |
| | GACGCCTGGCAGGGACGCCCTG | | | |
| | GCGCCTCTGTAGGCCGACTGCTC | | | |
| | GATCTGCTTACCAAGCTGGGCCG | | | |
| | CGACGACGTGCTGCTGGAGCTGG | | | |
| | GACCCAGCATTGAGGAGGATTGC | | | |
| | CAAAAGTATATCTTGAAGCAGCAG | | | |
| | CAGGAGGAGGCTGAGAAGCCTTT | | | |
| | ACAGGTGGCCGCTGTAGACAGCA | | | |
| | GTGTCCCACGGACAGCAGAGCTG | | | |
| | GCGGGCATCACCACACTTGATGA | | | |
| | CCCCCTGGGGCATATGCCTGAGC | | | |
| | GTTTCGATGCCTTCATCTGCTATT | | | |
| | GCCCCAGCGACATC | | | |
| Linker | GTCGAG | 1649 | VE | 1650 |
| CD40 | AAAAAGGTGGCCAAGAAGCCAAC | 1651 | KKVAKKPTNKAPHPKQEPQEINF | 1652 |
| | CAATAAGGCCCCCCACCCCAAGC | | PDDLPGSNTAAPVQETLHGCQP | |
| | AGGAGCCCCAGGAGATCAATTTT | | VTQEDGKESRISVQERQ | |
| | CCCGACGATCTTCCTGGCTCCAA | | | |
| | CACTGCTGCTCCAGTGCAGGAGA | | | |
| | CTTTACATGGATGCCAACCGGTC | | | |
| | ACCCAGGAGGATGGCAAAGAGAG | | | |
| | TCGCATCTCAGTGCAGGAGAGAC | | | |
| | AG | | | |
| Linker | GTCGAG | 1653 | VE | 1654 |
| FKBP_{WT}′ | GGCGTCCAAGTCGAAACCATTAG | 1655 | GVQVETISPGDGRTFPKRGQTCV | 1656 |
| | TCCCGGCGATGGCAGAACATTTC | | VHYTGMLEDGKKFDSSRDRNKP | |
| | CTACAAGGGGACAAACATGTGTC | | FKFMLGKQEVIRGVVEEGVAQMS | |
| | GTCCATTATACAGGCATGTTGGA | | VGQRAKLTISPDYAYGATGHPGII | |
| | GGACGGCAAAAAGTTCGACAGTA | | PPHATLVFDVELLKLE | |
| | GTAGAGATCGCAATAAACCTTTCA | | | |
| | AATTCATGTTGGGAAAACAAGAAG | | | |
| | TCATTAGGGGATGGGAGGAGGGC | | | |
| | GTGGCTCAAATGTCCGTCGGCCA | | | |
| | ACGCGCTAAGCTCACCATCAGCC | | | |
| | CCGACTACGCATACGGCGCTACC | | | |
| | GGACATCCCGGAATTATTCCCCC | | | |
| | TCACGCTACCTTGGTGTTTGACGT | | | |
| | CGAACTGTTGAAGCTCGAA | | | |
| Linker | GTCGAG | 1657 | VE | 1658 |
| FRB_{L} | CAATTGGAAATGTGGCATGAAGG | 1659 | QLEMWHEGLEEASRLYFGERNV | 1660 |
| | GTTGGAAGAAGCTTCAAGGCTGT | | KGMFEVLEPLHAMMERGPQTLK | |
| | ACTTCGGAGAGAGGAACGTGAAG | | ETSFNQAYGRDLMEAQEWCRKY | |
| | GGCATGTTTGAGGTTCTTGAACCT | | MKSGNVKDLLQAWDLYYHVFRRI | |
| | CTGCACGCCATGATGGAACGGGG | | SK | |
| | ACCGCAGACACTGAAAGAAACCT | | | |
| | CTTTTAATCAGGCCTACGGCAGA | | | |
| | GACCTGATGGAGGCCCAAGAATG | | | |
| | GTGTAGAAAGTATATGAAATCCGG | | | |
| | TAACGTGAAAGACCTGCTCCAGG | | | |
| | CCTGGGACCTTTATTACCATGTGT | | | |
| | TCAGGCGGATCAGTAAG | | | |
| STOPtail | TCAGGCGGTGGCTCAGGTCCGC | 1661 | SGGGSGPR-STOP | 166 |
| | GGTGA | | | |

### Example 26: Dual-Switches to Control Activation and Elimination of Targeted Therapeutic Cells

[0859] The present Example provides methods related to controlling the activation and elimination of targeted therapeutic cells. The immune or therapeutic cells may be used for immunotherapy, where the therapeutic cells are targeted to solid tumor or leukemic cells, for example. Where certain methods provide data related to the use of T cells that express chimeric antigen receptors, it is understood that these methods may be modified for the use of other therapeutic cells, and hetologous polypeptides such as, for example, recombinant T cell receptors. Thus, for example, where the vectors and cells provided in this example may include the use of a CAR with an antigen recognition moiety directed against a particular antigen, or cell, the vectors and cells may be modified to include a use of a recombinant TCR directed against a particular antigen, or cell, by, for example, substituting the polynucleotide coding for the CAR with a polynucleotide coding for the recombinant TCR.

[0860] FIG. 68 provides results of assays comparing the costimulatory ability of T cells that co-express a first generation CAR and either a rapamycin/rapalog, or a rimiducid-inducible chimeric truncated MyD88/CD40 polypeptide (MC) in T cells. For these assays, the rapalog-inducible MC (MC-Rap or iRMC) comprised a wild-type FKBP12 polypeptide (F_{wt}) and a FRB_{L} polypeptide (F_{L}); the rimiducid-inducible MC (IMC+CARζ, or iMC) comprised two FKBP12ᵥ36 polypeptides (Fᵥ) (FIG. 68B). The assay compared MCRap and iMC directed costimulation on CAR-T cell killing of tumor cells. Human PBMCs containing mostly T cells were activated and transduced with retrovirus vectors pBP1455 encoding a PSCA directed first generation CAR downstream of a rapalog responsive costimulatory domain (MyD88-CD40-FKBP-FRB_{L}, termed MC-Rap), retrovirus pBP0189 in which costimulation is imparted by iMC (MyD88-CD40-FKBP v36-FKBP v36) or with a control retrovirus construct encoding the CAR, but no costimulatory molecules. After seven days of rest with IL-2, CAR-T cells were cocultured with PSCA expressing HPAC tumor cells labeled with Red Fluorescent Protein (RFP) at an effector to target ratio of 1:30. Growth of the labeled cells over one week was measured microscopically in an Incucyte chamber. In the presence of 2 nM C7-isobutyloxyrapamycin (IbuRap), MC-rap containing cells were able to control tumor cells as effectively as rimiducid stimulated iMC containing iMC+CARζ−T cells.

[0861] FIG. 69 provides results of assays comparing the costimulatory ability of T cells that co-express a first generation CAR, an MCRap polypeptide, and a rimiducid-inducible chimeric Caspase-9 polypeptide (iC9) from the same vector, where the placement of the polynuclotide that expresses the MCRap polypeptide is varied. The results provided in this assay demonstrate that the placement of MCRap within the three gene unified vector affects the degree of costimulatory activity. FIG. 69 provides a schematic representation of the various retrovirus vectors.pBP1466 places MC-Rap (MC-FKBP-FRB_{L}) 3′ to the CAR and iC9 safety switch. pBP1491 places MC-Rap between iC9 and the CAR. pBP1494 places MC-Rap 5′ to iC9 and the CAR. The CAR in each case contained an ScFV targeting the PSCA antigen. 2A cotranslational cleavage sequences separate MC-Rap from the CAR and from the iC9 apoptotic switch. FIG. 69B: provides a reporter assay of costimulatory signaling. 293 cells were transfected with 1 μg NF-κB-SeAP reporter and 3 μg of the indicated DNA constructs. After 24 hours, cultures were split to 12 wells of a 96 well plate and mock stimulated or treated with 2 nM rimiducid or 2 nM C7-isobutyloxyrapamycin in quadruplicate. Each transfection displayed minimal basal activity without stimulation while construct 1494 with MC-Rap positioned at the 5′ end of the retroviral construct displayed enhanced activity when stimulated with IbuRap. FIG. 69C provides results of CAR-T cytokine secretion assays. Human PBMCs containing mostly T cells were activated and transduced with retrovirus vectors indicated in (A). After seven days of rest with IL-2, CAR-T cells were cocultured with PSCA expressing HPAC tumor cells labeled with Red Fluorescent Protein (RFP) at an effector to target ratio of 1:5. 24 hours after the co-culture was established media was removed and interferon-Y levels determined by ELISA. Secretion of this cytokine is influenced both by signal 1 from the TCRζ component of the CAR and from costimulation through induced MC activity. This costimulation is most robust with IbuRap in construct 1494 with MC-Rap positioned at the 5′ end of the retroviral construct. FIG. 69D provides the results of CAR-T killing assays. Modified transduced or transfected T cells comprising polypeptides with the indicated topological orientations were cultured with HPAC-RFP tumor targets at an E:T ratio of 1:20 and growth of the labeled cells over one week was measured microscopically in an Incucyte chamber. In the presence of 2 nM C7-isobutyloxyrapamycin (IbuRap), construct 1494 with MC-Rap positioned at the 5′end was most effective in drug dependent tumor control. (Not shown) In each case, activation of the safety switch iC9 with rimiducid incubation caused CAR-T apoptosis and a loss of tumor control.

[0862] FIG. 70 provides results of assays comparing the costimulatory ability of T cells that co-express a first generation CAR, an MCRap polypeptide, and a rimiducid-inducible chimeric Caspase-9 polypeptide (iC9) from the same vector, where the orientation and positioning of the polynucleotide that expresses the MCRap polypeptide is varied. The orientation and positioning of FRB and FKBP was modified to compare MC costimulatory activity in the T cell that expressed the vector. FIG. 70A provides a Schematic representation of retroviral vectors. BP1493 and BP1494 places FKBP and FRB_{L} 3′ to MC and in that orientation. pBP1796 maintains the same orientation of FKBP relative to FRB but places these drug binding components at the 5′ end of the construct thus making an amino terminal fusion. Constructs BP1757 and BP1759 reverse the orientation of FRB and FKBP placing FRB_{L} at the amino terminus. The antigens targeted by the ScFV units of the CARs are indicated. FIG. 70B provides results of reporter assays assay of costimulatory signaling. 293 cells were transfected with 1 μg NF-κB-SeAP reporter and 3 μg of the indicated DNA constructs. After 24 hours, cultures were split 96 well plates and a dilution series of C7-isobutyloxyrapamycin added in quadruplicate. Each transfection displayed minimal basal activity without stimulation while construct 1757 displayed enhanced stimulation with the rapalog. FIGS. 70C and 70D provide results of PSCA-CAR-T killing assays. T cells with the indicated topological orientations of FRB_{L}, FKBP and MC were cultured with HPAC-RFP tumor targets at an E:T ratio of 1:20 (C) or 1:30 (D) and growth of the labeled cells over one week was measured microscopically in an Incucyte chamber. In the presence of 2 nM C7-isobutyloxyrapamycin (IbuRap), construct 1757 with MC-Rap positioned at the 5′end was most effective in tumor control without the addition of drug.

[0863] Increased potency with drug was indicated at high E:T of 1:30 where only 1757 was able to proliferate sufficiently to maintain tumor control. FIGS. 70E, 70F, and 70G provide results of HER2-CAR-T killing assays. T cells with the indicated topological orientations of FRB_{L}, FKBP and MC were cultured with HPAC-RFP tumor targets at an ET ratio of 1:15 (FIG. 70E), SKOV3 ovarian cancer cells (E:T=1:10) (FIG. 70F) or SKBR3-GFP breast cancer cells (E:T=1:1) (FIG. 70G) and growth of the labeled cells over one week was measured microscopically in an Incucyte chamber. In the presence of 2 nM C7-isobutyloxyrapamycin (IbuRap), construct 1759 with MC-Rap positioned at the 5′end was most effective in tumor control without the addition of drug. Increased potency with drug was indicated at high E:T of 1:30 where only 1757 was able to proliferate sufficiently to maintain tumor control. From these data it is concluded that maximal drug dependent MC-Rap potency is effected by positioning FRB then FKBP amino terminal to MC.

[0864] FIG. 71 provides results of assays that assay the apoptotic activity of T cells that co-express a first generation CAR, an MCRap polypeptide, and an iC9 polypeptide. The assays provide results showing that in these cells, the inducible apoptosis is only directed by dimerization of iC9 with rimiducid. PBMCs containing mostly T cells were activated and transduced with the indicated retroviral constructs and a control construct BP1488 that carries only MC-Rap with the CAR and no iC9. Cells were incubated with caspase 3/7 activity indicator reagent (Essen Biosciences) in an Incucyte incubator/microscope with increasing quantities of rimiducid (FIG. 71A) or C7-isobutyloxyrapamycin (FIG. 71B). At very low concentrations of rimiducid (<100 pM), the FKBPᵥ₃₆-caspase9 (iC9) component was observed to be activated from each construct but not from the MC-Rap CAR-T cells (1488) not containing iC9. Even high concentrations of IbuRap over 100 fold above the level used to activate MC-rap (normally 1 nM is used) are insufficient to activate apoptosis indicating that complex rapamycin directed heterodimerization events between coexpressed MC-FKBP-FRB_{L} and FKBP-Caspase that are theoretically possible, are not evident in this assay.

[0865] FIG. 72 provides schematic diagrams of a dual-switch iMC plus iRC9, in the form of single retroviral vector, or in two retroviral vectors. FIG. 72A provides a schematic of a unified vector design that amalgamates both the iMC activation switch (FvFv) (present at the 3′ end of the vector) and the iRC9 (FRB and FKBP_{wt}) which is present in the vector at the 5′ end. Transduced T cells are marked with the Q-bend 10 (Q) epitope derived from CD34. The CombiCAR platform (FIG. 72B) includes the same protein components, but expressed from two retroviruses to increase the expression level of iMC and thereby the potency of the construct. iRC9 is marked by the expression of a truncated form of CD19 that contains only the extracellular domain and no intracellular signaling domain. The iMC+CARζ component incorporates iMC for costimulation and the CAR cistron which contains the Q epitope marker immediately following the ScFV.

[0866] FIG. 73A provides the results of assays of apoptosis activity in cells that express the iRC9 polypeptide, where the orientation and positioning of FRB and FKBPwt are varied. FIG. 73A provides schematic representations of iRC9 retroviral constructs BP1501 is a negative control containing only the caspase9 component without a drug-binding moiety. BP0220 is a iC9 construct in which FKBPv is attached to caspase 9 producing iC9. This construct is responsive to rimiducid and not rapamycin. Constructs BP1310 and BP1311 have wild-type FKBP (to which rimiducid has poor affinity) and FRB in the indicated orientations. FIG. 73B provides results of assays of T cells transduced with various retroviral constructs of FIG. 73A. PBMCs containing mostly T cells were activated and transduced with the indicated retroviral constructs and cells were incubated with caspase 3/7 activity indicator reagent (Essen Biosciences) in an Incucyte incubator/microscope for 24 h with increasing quantities of rapamycin. Fluorescent conversion of the cells indicates cleavage of the caspase 3/7 reagent to mark apoptosis over time. FIG. 73C is a graphical representation of the maximal apoptotic activity relative to the commencement of drug treatment from the assays of FIG. 73B, as a function of rapamycin concentration. iRC9 is most effective when FRB is positioned amino-terminal to FKBP12 and caspase-9. FIG. 73D provides a Western blot of Caspase-9 transgene expression in T cells. Cells from two donors transduced with the indicated retroviral vectors were lysed and protein extracted, resolved on an SDS polyacrylamide gel, transferred to a PVDF filter and caspase-9 expression visualized by western blot. Consistent with the higher rapamycin-induced apoptotic activity of BP1310, expression was slightly higher than that of BP1311.

[0867] FIG. 74 provides results of assays comparing the activation profile of iMC+CARζ−T cells (cells express iMC and CAR) with CombiCAR-T cells (cells express iMC, CAR, and iRC9). To determine if inclusion of the chimeric caspase polypeptide from BP1311 impairs iMC+CARζ−T cell efficacy, human PBMCs were activated and transduced with the indicated retrovirus vectors. After seven days of rest with IL-2, CAR-T cells were cocultured with PSCA expressing HPAC tumor cells labeled with Red Fluorescent Protein (RFP) at an effector to target ratio of 1:10. 48 hours after the co-culture was established media was removed and interleukin-6 (IL-6, FIG. 74A), IL-2 (FIG. 74B), and interferon-Y (IFN-Y, FIG. 74C) levels determined by ELISA. Cytokine secretion was augmented by rimiducid treatment in a dose-dependent fashion and was closely similar between iMC+CARζ and CombiCAR formats. Interestingly CombiCAR was somewhat less effective to stimulate IFN secretion. FIG. 74D provides the results of a CAR-T killing assay. CAR-T cells in the indicated formats with the indicated topological orientations were cultured with HPAC-RFP tumor targets at an E:T ratio of 1:10. Growth of the labeled cells over one week was measured microscopically in an Incucyte chamber. At this level of CAR-T inclusion killing was not dependent on drug but was enhanced by basal activity of iMC (compare each CAR format with BP1373 which lacks iMC). FIG. 74E provides a Western blot of expression of iMC and chimeric caspase polypeptide in each CAR format. T Cells transduced with the indicated retroviral vectors were lysed and protein extracted, resolved on an SDS polyacrylamide gel, transferred to a PVDF filter and expression of the indicated proteins probed by western blot. Vinculin expression represents the equality of loading of each lane in the gel. Expression of iMC was similar between iMC+CARζ and CombiCAR formats.

[0868] FIG. 75 provides the results of assays of rapamycin-inducible Caspase-9 (IRC9) within unified-single- and dual-vector formats. T cells from two separate donors (877 and 904) were (anti-CD3/CD28) activated and non-transduced (NT) or transduced with retroviruses encoding CD34 epitope-marked iMC+CARζ−T (iMC-2A-CAR-zeta), (iMC-2A-iRC9-2A-CAR-zeta), or CombiCAR (co-transduction with viruses encoding iMC+CARζ−T and iRC9). A population of 5×10⁷ iMC+CARζ−T cells (1463) and T cells (1358) were enriched for transduced cells by purification with a CD34 microbead kit (Miltenyi) while CombiCAR cells were selected with CD19 microbeads that identified the marker from the chimeric caspase construct. This enrichment procedure, or ‘sorting’ of highly transduced cells yielded greater than 95% marker positivity. In FIG. 75A, cells were incubated with a Caspase 3/7 activity indicator (Essen Biosciences) in an IncuCyte plate incubator/microscope with 0, 1, or 10 nM rapamycin. Readings of apoptosis (via Caspase-3/7 activation) were automatically conducted every 4 hours and shown for unsorted (top panel) and sorted (bottom panel) cells. FIG. 75B provides graphical representations of data for both donors (and average values) at the 12-hour timepoint for unsorted (left panel) and sorted (right panel) cells. For FIG. 75C, similarly transduced T cells were incubated for 24 hours in the presence of 0, 1, or 10 nM rapamycin and stained with Annexin V and propidium iodide (PI) for cell death. Representative graphs of unsorted cells from 1 donor are shown. FIG. 75D provides graphical representations of the results of both donors from unsorted (left panel) and sorted (right panel) cells treated for 24 hours as in FIG. 75C.

[0869] FIG. 76 provides the results of in vivo experiments assessing the efficacy of different forms of iMC co-expressed in T cells with an anti-CD123 CAR directed against acute myelogenous leukemia tumors. The iMC was assessed in the form of a iMC+CARζ−T cell that does not express the iRC9 safety switch, and in the form of the dual-switch CombiCAR platform, where the cells also express iRC9. FIG. 76A provides micrographs of tumor-bearing animals determined by bioluminescence (BLI) imaging. 1.0×10⁶ GFP-Luciferase-expressing THP-1 tumor cells were injected i.v. into age-matched NSG mice. Seven days later (day 0), 2.5×10⁶ non-transduced (NT), iMC+CARζ-transduced, or CombiCAR-transduced (i.e., dual-transduced cells with iMC+CARζ−T and iRC9 vectors, marked by CD34 or CD19-derived epitopes, respectively) T cells were injected into tumor-bearing animals. Groups (n=5) were injected with rimiducid (1 mg/kg) at day 1 and day 15. Animals were imaged weekly starting on the day of T cell injection (day 0). Transduced CombiCAR cells were CD19-selected and normalized for CAR expression via CD34. FIG. 76B provides data showing the average tumor growth per group (left panel), reflected via BLI (Radiance) or % weight change post-T cell injection (right panel) is shown. FIG. 76C provides data showing the number of human T cells in spleens at termination (day 28). Left panel shows total number of human (murine (m) CD45-CD3⁺) T cells before or after rimiducid (AP) injection. Middle panel shows the % of human T cells with detectable CAR expression (via CD34 epitope). Right panel shows the % of human T cells with detectable iRC9 (via CD19 epitope). *=p<0.05 by Student's T test. FIG. 76D provides data showing the vector copy number (VCN) determined by qPCR from DNA derived from spleen (top) or bone marrow (bottom). Primers were chosen specific for iMC (left panels) or iCaspase-9 (right panels). *=p<0.05 by Student's T test.

[0870] FIG. 77 provides the results of in vivo experiments assessing the efficacy of different forms of iMC co-expressed in T cells with an anti-CD33 CAR directed against MOLM13 tumors. The iMC was assessed in the form of a iMC+CARζ−T cell that does not express the iRC9 safety switch, and in the form of the dual-switch CombiCAR platform, where the cells also express iRC9. FIG. 77A provides micrographs of tumor-bearing animals determined by BLI imaging. PBMCs were activated and co-transduced with retroviruses derived from the anti-CD33 iMC+CARζ−T vector (pBP1293) and the iRC9 vector (pB1385). NSG mice were engrafted with 1×10⁶ MOLM13-GFP. Fluc cells i.v. for 6 days followed by i.v. infusion of 5×10⁶ iRC9 or CD33-CombiCAR-expressing T cells. Rimiducid or placebo were given i.p. weekly after T cell infusion at 1 mg/kg. In FIG. 77A, GFP. Fluc growth was measured using IVIS bioluminescence (BLI) and average radiance was calculated (FIG. 77B). FIG. 77C provides the results of Kaplan-Meier analysis from the in vivo assay of FIG. 77A. FIG. 77D provides the results of representative FACS analysis of the rimiducid-treated CD33 CombiCAR group at termination on day 32 after T cell injection.

[0871] FIG. 78 provides the results of assays comparing the specificity and efficacy of the rimiducid inducible iC9 and rapamycin-inducible (iRC9) apoptotic switches in a whole animal model. 1.0×10⁷ T cells transduced with BP220 (containing iC9) or BP1310 (containing iRC9) and with a GFP-luciferase vector were implanted intravenously into 8-week-old female, immune-deficient mice (NOD.CgPrkdc^{scid} II2rg^{tm1Wjl}/SzJ; NSG). Mice were subjected to IVIS imaging ˜4 hrs after T cell injection (−14 hrs post-drug administration). The following day, mice were imaged just before drug injection (0 hrs), then injected IP with vehicle, rimiducid diluted in solutol and PBS, or rapamycin diluted in 10% PEG, 17% Tween-80. Mice were imaged again at 5-6 hrs, and 24 hrs after drug injection. Mice were sacrificed and spleens were removed for FACS analysis. FIG. 78A provides the results of BLI assays. Mice were imaged for firefly luciferase-derived bioluminescence by IVIS. Mice were imaged at the indicated time points relative to administration of drug or vehicle. Because rimiducid is specific for the F36V mutant of FKBP12 and the iC9 utilizes wild-type FKBP12, loss of radiance by T cell apoptosis is only observed with rimiducid treatment of the iC9 and not iC9 bearing animals. FIG. 78B provides a graphical representation of the average calculated radiance from FIG. 78A. FIG. 78C provides data showing the results of independent quantitative analyses of the in vivo assays of FIG. 78A. Human T cells in mice spleens were isolated and single-cell suspensions were made by lysing red cells with ammonia chloride/potassium (ACK)-based lysis buffer followed by mechanical dissociation through a 70-μm nylon filter. Cells were subsequently stained with the following antibodies: anti-hCD3-PerCP.Cy5.5, anti-hCD19-APC, and anti-mCD45RA-BV510. Human T cell counts were normalized to the number of mouse CD45 expressing cells present in the spleen preparations.

[0872] FIG. 79 provides the results of dose responsiveness assays of the rapamycin induced iC9 apoptotic switch in a whole animal model. 1.0×10⁷ T cells transduced with BP1385 (containing iRC9) and with a GFP-luciferase vector were implanted intravenously into 8-week-old female, immune-deficient mice (NOD.CgPrkdc^{scid} II2rg^{tm1Wjl}/SzJ; NSG). Mice were subjected to IVIS imaging ˜4 hrs after T cell injection (−24 hrs post-drug administration). The following day, mice were imaged just before drug injection (0 hrs), then injected IP with vehicle, rimiducid diluted in solutol and PBS or rapamycin diluted in 5% PEG, 2.5% Tween-80 at the step-log dilutions from 10 mg/kg body weight. Mice were imaged again at 5-6 hrs, and 24 hrs after drug injection. Mice were sacrificed and spleens were removed for FACS analysis. FIG. 79A provides a pictoral representation of BL1 imaging. FIG. 79B provides a graphical representation of the average calculated radiance from FIG. 79A. FIG. 79C provides graphs of the number of human T cells in spleens at termination (24 hours). Left panel shows total number of human (murine (m) CD45-CD3⁺) that are marked with CD19 indicating presence of the apoptotic switch. Middle panel shows the mean fluorescence intensity for the CD19 marker in the human T cells remaining in the spleen. Right panel shows the total number of human T cells with detectable iC9 (via CD19 epitope). *=p<0.05 by Student's T test. FIG. 79D provides graphs of vector copy number (VCN) determined by qPCR from DNA derived from spleen. Primers were chosen specific for iMC (left panel, a negative control in this experiment) or iCaspase-9 and GFP-luc (middle and right panels).

### Example 27: A Dual-Switch Platform to Control CAR-T Cell Efficacy and Safety with Two Independent, Non-Toxic Chemical Inducers of Protein Dimerization

[0873] The present example discusses the use of a single retroviral vector to express an iRMC polypeptide, a first generation CAR, and an iC9 safety switch. For this example, a rapalog, C7-isobutyloxyrapamycin (Ibu-Rap) was used to induce MC activity. It is understood that wild type FRB and rapamycin may also be used in the present example. Also, for this example, the iRMC comprised a modified FRB polypeptide, called FRB_{KLW} or “KLW”. In other examples of the present technology, the iRC9 and iRMC polypeptides may comprise modified FRB polypolyptides rather than the wild type FRBs provided herein. Also, various rapalogs that bind to the wild type or modified FRB polypeptides may be used to activate iRC9 or iRMC.

[0874] Chimeric Antigen Receptor (CAR) T cell strategies have demonstrated effectiveness against multiple disseminated cancers, but solid tumors remain a challenge. To improve efficacy a platform was developed to separate tumor antigen-specific first generation CARs from a cytosolic costimulatory component, iRMC, regulated by a non-immunosuppressive analog of rapamycin, C7-isobutyloxyrapamycin (IBuRap). To mitigate the risk of off-tumor cytotoxicity or excessive cytokine release, iRMC was combined with the Caspase-9-based switch, iC9, directing rapid T cell apoptosis by rimiducid-regulated homodimerization and activation.

[0875] To produce a non-immunosuppressive rapamycin analog (rapalog), the acid-sensitive C7-methoxy group was replaced with an isobutyloxy moiety. The added bulk of this ‘bump’ reduced affinity and inhibition for mTOR/TORC1 but retained subnanomolar affinity for a mutant FKBP-Rapamycin Binding (FRB) domain, termed KLW, derived from mTOR. KLW was fused in-tandem with wild-type FKBP12 and the costimulatory signaling domains MyD88 and CD40 to create iRMC. NF-κB activity was stimulated in a robust and dose-dependent fashion (EC₅₀<1 nM) with iBuRap. When incorporated into a retroviral (iRMC-2A-iC9-2A-CAR) format and incubated with CAR-specific tumor cells, IBuRAP addition stimulated T cell proliferation, cytokine production and dose-dependent tumor cell killing. In 7-day cocultures, rapalog/iRMC-stimulated HER2-specific iRMC-2A-iC9-2A-CAR T cells preferentially proliferated, leading to elimination of >90% of SKBR3 breast carcinoma cells (E:T, 1:1), SKOV3 ovarian carcinoma (E:T, 1:5), or HPAC (E:T, 1:15) pancreatic carcinoma cells. If rimiducid was included in iRMC-2A-iC9-2A-CAR-T cultures, T cell apoptosis was rapidly induced (T1/2=6 hours for microscopic observation of fluorescent caspase-3 substrate). Despite the fact that both iRMC and iC9 incorporated FKBP12 domains, because rimiducid is highly specific for the F36V variant of FKBP12, the costimulatory and safety switches are orthogonally regulated.

### Example 28: Dual-Switches to Target Solid Tumors

[0876] The present example discusses the use of a two retroviral vectors, where the first vector expresses an iMC and a first generation CAR, and the second vector expresses a iRC9 safety switch.

[0877] While chimeric antigen receptor (CAR) T immunotherapies have shown remarkable efficacy against leukemias and lymphomas, improved CAR-T efficacy and persistence without compromising safety are needed to overcome solid tumors. Two independently regulated molecular switches were developed that can elicit specific and rapid induction of cellular responses upon exposure to their cognate ligands. Cell activation is controlled by the homodimerizer rimiducid that triggers signaling cascades downstream of MyD88 and CD40 (iMC). A rapamycin-controlled pro-apoptotic switch is co-expressed, which induces dimerization of caspase-9 to mitigate possible toxicity from excessive CAR-T function (IRC9). When combined with a first generation CAR, these molecular switches allow for specific and efficient regulation of engineered T cells.

[0878] T cells were activated and co-transduced with the “iMC+CARζ”, SFG-iMC-2A-CAR.ζ vector, and a iC9-X vector, SFG-FRB.FKBP12.C9-2A-ΔCD19 to create a CombiCAR. The observed rapid kinetics and ˜95% efficiency of rapamycin-dependent cell death was determined by caspase-3 activation and annexin V conversion. In vivo assessment of iC9-X functionality was performed with EGFPluciferase (EGFPluc)-labeled T cells in NSG mice, showing that rapamycin treatment caused cell death in 90% of iRMC-containing T cells within 24 hours, similar to clinically validated rimiducid-regulated iC9.

[0879] iMC costimulation was further evaluated in a 7-day tumor cell coculture by cytokine production, T cell growth and tumor cell killing. Addition of iC9-X did not deleteriously affect antitumor efficacy of rimiducid-treated iMC-containing CAR-T cells, which eliminated OE-19 esophageal tumor cells in a coculture assay at a 1:20 effector to target ratio (3.9±4.3% OE19-GFP.Ffluc cells remained in iMC+CARζ-modified cultures 1.1±0.1% for CombiCAR), or T cell expansion (53.4±9.4% CAR⁺ for iMC+CARζ vs 44.6±13.2% for CombiCAR). In vivo efficacy of the CombiCAR-T cells was evaluated weekly in NSG mice implanted with EGFPluc-marked tumor burden and for T cell persistence via a Renilla luciferase marker. When challenged in a OE9 tumor-bearing mouse model, anti-HER2 dual-switch T cells controlled tumor growth in a rimiducid-dependent manner, which was representative of multiple tumor models.

[0880] The dual-switch platform comprising separate ligand dependent activation and apoptosis and a first generation CAR, efficiently controlled T cell growth and tumor elimination when costimulation was provided via systemic administration of rimiducid. Deployment of iC9-X results in rapid and efficient elimination of CombiCAR-T cells, providing a user-controlled system for managing persistence and safety of tumor antigen-specific CAR-T cells.

### Example 29: Dual-Switches to Activate Recombinant TCR-Expressing Cells

[0881] The present example discusses the use of a two retroviral vectors, where the first vector expresses an iMC and a recombinant TCR directed against PRAME, and the second vector expresses a iRC9 safety switch.

[0882] T cells engineered to express the α and β chains of antigen-specific T cell receptors (TCRs) have shown promise as a cancer immunotherapy treatment; however, durable responses have been limited by poor persistence of gene-modified T cells. Additionally, severe toxicities, including patient deaths, have occurred upon infusion of large numbers of TCR-modified T cells. To enhance T cell persistence while providing a safeguard against life-threatening toxicity, a dual-switch αβ TCR platform was developed that uses a rapamycin (Rap)-induced caspase-9 (IRC9) together with a rimiducid (Rim)-controlled activation switch, inducible MyD88/CD40 (IMC).

[0883] The αβ TCR sequence derived from an HLA-A2-restricted, PRAME-specific T cell clone was synthesized and placed in-frame with iMC, comprising signaling domains from MyD88 and CD40 fused to tandem Rim-binding mutant FKBP12v36 domains to generate the iMC-PRAME TCR. Caspase-9 was fused to FRB and wild-type FKBP domains and cloned in-frame with a selectable marker, truncated CD19 (ΔCD19) to generate iRC9-ΔCD19 retrovirus. All modules were separated by 2A polypeptide sequences. Activated human T cells were dual-transduced with iMC-PRAME TCR and iRC9-ΔCD19 viruses and subsequently enriched for CD19 expression using magnetic columns. iMC and iRC9 were activated by exposing transduced T cells to 10 nM Rim or Rap, respectively. Proliferation, cytokine production and cytotoxicity of TCR-modified T cells were assessed in co-culture assays with U266 (myeloma) and THP-1 (AML) cells in presence or absence of inducible ligands.

[0884] T cells transduced with iMC-PRAME TCR and iRC9-ΔCD19 showed efficient and stable expression for TCR and ΔCD19 post-CD19 selection (82±9% CD3⁺Vβ1⁺, 96±2% CD3⁺CD19⁺). In coculture assays, dual-switch PRAME TCR demonstrated specific lysis of HLA-A2⁺PRAME⁺ THP-1 and U266 tumor cells compared to an irrelevant TCR (CMVpp65) with or without iMC activation. However, Rim exposure induced a 42-fold induction of IL-2 (9±0.3 versus 385±180 pg/ml IL-2) and resulted in 13-fold expansion of TCR-modified T cells. The expression of iRC9 did not interfere with TCR function, nor with the synergy between TCR and iMC activation. Further, exposure to Rap triggered rapid apoptosis of dual-switch TCR-modified T cells (72±5% Annexin-V⁺ with Rap versus 14±4% without drug) indicating that the suicide switch is also functional.

[0885] iMC utilizes rimiducid to provide costimulation to TCR-engineered T cells. In addition, iRC9 is provides a rapamycin-inducible suicide switch that can eliminate T cells in case of severe toxicity. This iMC-enhanced iRC9-incorporating TCR is a prototype of novel dual-switch TCR-engineered T cell therapies that may increase efficacy, durability and safety of adoptive T cell therapies.

[0886] The following Appendices provide sequences and plasmids referred to in Examples provided herein:

Appendix 18: pBP1293-pSFG-iMC.T2A-αhCD33 (My9.6).ζ

| | | SEQ | | SEQ |
|---|---|---|---|---|
| | | ID | | ID |
| Fragment | Nucleotide | NO: | Peptide | NO: |
| MyD88 | atggctgcaggaggtcccggcgcggggtctgcgg | 1663 | MAAGGPGAGSAAPVSSTSSLPLA | 1664 |
| | ccccggtctcctccacatcctcccttcccctggctgc | | ALNMRVRRRLSLFLNVRTQVAAD | |
| | tctcaacatgcgagtgcggcgccgcctgtctctgtt | | WTALAEEMDFEYLEIRQLETQAD | |
| | cttgaacgtgcggacacaggtggcggccgactgg | | PTGRLLDAWQGRPGASVGRLLD | |
| | accgcgctggcggaggagatggactttgagtactt | | LLTKLGRDDVLLELGPSIEEDCQK | |
| | ggagatccggcaactggagacacaagcggacc | | YILKQQQEEAEKPLQVAAVDSSV | |
| | ccactggcaggctgctggacgcctggcagggac | | PRTAELAGITTLDDPLGHMPERF | |
| | gccctggcgcctctgtaggccgactgctcgatctgc | | DAFICYCPSDI | |
| | ttaccaagctgggccgcgacgacgtgctgctgga | | | |
| | gctgggacccagcattgaggaggattgccaaaa | | | |
| | gtatatcttgaagcagcagcaggaggaggctgag | | | |
| | aagcctttacaggtggccgctgtagacagcagtgt | | | |
| | cccacggacagcagagctggcgggcatcacca | | | |
| | cacttgatgaccccctggggcatatgcctgagcgtt | | | |
| | tcgatgccttcatctgctattgccccagcgacatc | | | |
| Linker | gtcgag | 1665 | VE | 1666 |
| CD40 | aaaaaggtggccaagaagccaaccaataaggc | 1667 | KKVAKKPTNKAPHPKQEPQEINF | 1668 |
| | cccccaccccaagcaggagccccaggagatca | | PDDLPGSNTAAPVQETLHGCQP | |
| | attttcccgacgatcttcctggctccaacactgctgct | | VTQEDGKESRISVQERQ | |
| | ccagtgcaggagactttacatggatgccaaccggt | | | |
| | cacccaggaggatggcaaagagagtcgcatctc | | | |
| | agtgcaggagagacag | | | |
| Linker | gtcgag | 1669 | VE | 1670 |
| FKBP_{V}′ | ggcgtccaagtcgaaaccattagtcccggcgatg | 1671 | GVQVETISPGDGRTFPKRGQTCV | 1672 |
| | gcagaacatttcctaaaaggggacaaacatgtgt | | VHYTGMLEDGKKVDSSRDRNKP | |
| | cgtccattatacaggcatgttggaggacggcaaa | | FKFMLGKQEVIRGWEEGVAQMS | |
| | aaggtggacagtagtaGaGAtcGcAAtAAa | | VGQRAKLTISPDYAYGATGHPGII | |
| | CCtTTcAAaTTcATGtTgGGaAAaCAa | | PPHATLVFDVELLKLE | |
| | GAaGTcATtaGgGGaTGGGAgGAgG | | | |
| | GcGTgGCtCAaATGtccGTcGGcCAac | | | |
| | GcGCtAAgCTcACcATcagcCCcGAcT | | | |
| | AcGCaTAcGGcGCtACcGGaCAtCCc | | | |
| | GGaATtATtCCcCCtCAcGCtACctTgG | | | |
| | TgTTtGAcGTcGAaCTgtTgAAgCTcGA | | | |
| | a | | | |
| Linker | gtcgag | 1673 | VE | 1674 |
| FKBP_{V} | ggagtgcaggtggagactatctccccaggagac | 1675 | GVQVETISPGDGRTFPKRGQTCV | 1676 |
| | gggcgcaccttccccaagcgcggccagacctgc | | VHYTGMLEDGKKVDSSRDRNKP | |
| | gtggtgcactacaccgggatgcttgaagatggaa | | FKFMLGKQEVIRGWEEGVAQMS | |
| | agaaagttgattcctcccgggacagaaacaagcc | | VGQRAKLTISPDYAYGATGHPGII | |
| | ctttaagtttatgctaggcaagcaggaggtgatccg | | PPHATLVFDVELLKLE | |
| | aggctgggaagaaggggttgcccagatgagtgtg | | | |
| | ggtcagagagccaaactgactatatctccagatta | | | |
| | tgcctatggtgccactgggcacccaggcatcatcc | | | |
| | caccacatgccactctcgtcttcgatgtggagcttct | | | |
| | aaaactggaa | | | |
| Linker | ccgcGG | 1677 | PR | 1678 |
| T2A | GAGGGCAGAGGCAGCCTCCTGAC | 1679 | EGRGSLLTCGDVEENPGP | 1680 |
| | ATGTGGGGACGTCGAGGAGAACC | | | |
| | CTGGCCCA | | | |
| Linker | CCTTGG | 1681 | PW | 1682 |
| Signal | ATGGAGTTCGGATTGAGCTGGCTG | 1683 | MEFGLSVVLFLVAILKGVQCSR | 1684 |
| Peptide | TTCCTGGTGGCAATACTCAAGGGC | | | |
| | GTTCAATGTTCACGG | | | |
| My9-6 VL | GAAATTGTGCTGACTCAGAGCCCG | 1685 | EIVLTQSPGSLAVSPGERVTMSC | 1686 |
| | GGTAGCCTGGCCGTGTCCCCCGG | | KSSQSVFFSSSQKNYLAVVYQQIP | |
| | AGAGCGAGTGACCATGAGCTGTAA | | GQSPRLLIYWASTRESGVPDRFT | |
| | ATCCAGCCAATCAGTTTTTTTTTCA | | GSGSGTDFTLTISSVQPEDLAIYY | |
| | TCATCTCAAAAAAACTATCTGGCAT | | CHQYLSSRTFGQGTKLEIKR | |
| | GGTACCAACAGATACCCGGGCAGT | | | |
| | CCCCACGGCTGCTGATTTACTGGG | | | |
| | CATCAACACGCGAGAGCGGTGTG | | | |
| | CCCGACAGATTCACCGGAAGCGG | | | |
| | GAGCGGCACGGACTTCACACTTAC | | | |
| | CATCTCAAGCGTACAACCGGAGGA | | | |
| | CTTGGCTATCTATTACTGCCACCAA | | | |
| | TATCTTTCCTCCAGAACATTCGGAC | | | |
| | AGGGAACGAAACTGGAGATCAAAA | | | |
| | GA | | | |
| Flex | GGCGGCGGGAGTGGGGGAGGAG | 1687 | gggsgggg | 1688 |
| | GT | | | |
| Linker | CAGGTG | 1689 | qv | 1690 |
| My9-6 VH | CAGGTGCAGCTGCAGCAGCCTGG | 1691 | QVQLQQPGAEVVKPGASVKMSC | 1692 |
| | AGCCGAGGTGGTGAAGCCCGGCG | | KASGYTFTSYYIHWIKQTPGQGL | |
| | CATCTGTGAAAATGTCTTGCAAGG | | EVVVGVIYPGNDDISYNQKFQGKA | |
| | CAAGCGGATATACATTTACTAGCTA | | TLTADKSSTTAYMQLSSLTSEDS | |
| | CTACATCCATTGGATCAAGCAAAC | | AVYYCAREVRLRYFDVWGQGTT | |
| | CCCCGGACAGGGCCTCGAATGGG | | VTVSS | |
| | TGGGAGTTATTTACCCGGGGAACG | | | |
| | ATGATATCTCTTATAATCAGAAATT | | | |
| | CCAAGGGAAAGCCACCCTGACTGC | | | |
| | AGACAAATCAAGTACCACAGCCTA | | | |
| | TATGCAGCTCAGCTCCCTGACAAG | | | |
| | CGAGGATTCCGCTGTGTACTACTG | | | |
| | TGCCAGGGAGGTTAGACTTCGATA | | | |
| | TTTTGATGTTTGGGGGCAGGGAAC | | | |
| | TACCGTGACCGTGAGCAGC | | | |
| Linker | GGCTCC | 1693 | gs | 1694 |
| CD34 | GAGCTGCCAACCCAGGGAACTTTT | 1695 | ELPTQGTFSNVSTNVS | 1696 |
| epitope | TCAAATGTATCAACTAACGTCTCA | | | |
| CD8 | CCCGCGCCACGACCACCAACACC | 1697 | PAPRPPTPAPTIASQPLSLRPEAC | 1698 |
| stalk | AGCCCCAACCATTGCATCCCAGCC | | RPAAGGAVHTRGLDFACD | |
| | TTTGTCTCTCCGGCCCGAGGCTTG | | | |
| | TCGCCCCGCCGCCGGGGGTGCCG | | | |
| | TCCATACCCGAGGCCTGGACTTCG | | | |
| | CCTGCGAT | | | |
| CD8 | ATATATATTTGGGCTCCTCTGGCC | 1699 | IYIWAPLAGTCGVLLLSLVITLYCN | 1700 |
| trans- | GGTACCTGCGGCGTACTGCTCCTG | | HRNRRRVCKCPR | |
| membrane | TCACTGGTAATAACCCTGTATTGCA | | | |
| | ATCACAGGAACAGAAGGAGAGTCT | | | |
| | GTAAGTGCCCCCGC | | | |
| Linker | GTCGAC | 1701 | VD | 1702 |
| CD3ζ | AGAGTGAAGTTCAGCAGGAGCGCA | 1703 | RVKFSRSADAPAYQQGQNQLYN | 1704 |
| | GACGCCCCCGCGTACCAGCAGGG | | ELNLGRREEYDVLDKRRGRDPE | |
| | CCAGAACCAGCTCTATAACGAGCT | | MGGKPRRKNPQEGLYNELQKDK | |
| | CAATCTAGGACGAAGAGAGGAGTA | | MAEAYSEIGMKGERRRGKGHDG | |
| | CGATGTTTTGGACAAGAGACGTGG | | LYQGLSTATKDTYDALHMQALPP | |
| | CCGGGACCCTGAGATGGGGGGAA | | R | |
| | AGCCGAGAAGGAAGAACCCTCAG | | | |
| | GAAGGCCTGTACAATGAACTGCAG | | | |
| | AAAGATAAGATGGCGGAGGCCTAC | | | |
| | AGTGAGATTGGGATGAAAGGCGAG | | | |
| | CGCCGGAGGGGCAAGGGGCACGA | | | |
| | TGGCCTTTACCAGGGTCTCAGTAC | | | |
| | AGCCACCAAGGACACCTACGACGC | | | |
| | CCTTCACATGCAAGCTCTTCCACC | | | |
| | TCGT | | | |
| STOP | TGA | 1705 | stop | |

Appendix 19: pBP1296-pSFG-iMC.T2A-αhCD123 (32716).ζ

| | | SEQ | | SEQ |
|---|---|---|---|---|
| Fragment | Nucleotide | ID NO: | Peptide | ID NO: |
| MyD88 | atggctgcaggaggtcccggcgcggggtctgcgg | 1706 | MAAGGPGAGSAAPVSSTSSLPLA | 1707 |
| | ccccggtctcctccacatcctcccttcccctggctgc | | ALNMRVRRRLSLFLNVRTQVAAD | |
| | tctcaacatgcgagtgcggcgccgcctgtctctgtt | | WTALAEEMDFEYLEIRQLETQAD | |
| | cttgaacgtgcggacacaggtggcggccgactgg | | PTGRLLDAWQGRPGASVGRLLD | |
| | accgcgctggcggaggagatggactttgagtactt | | LLTKLGRDDVLLELGPSIEEDCQK | |
| | ggagatccggcaactggagacacaagcggacc | | YILKQQQEEAEKPLQVAAVDSSV | |
| | ccactggcaggctgctggacgcctggcagggac | | PRTAELAGITTLDDPLGHMPERF | |
| | gccctggcgcctctgtaggccgactgctcgatctgc | | DAFICYCPSDI | |
| | ttaccaagctgggccgcgacgacgtgctgctgga | | | |
| | gctgggacccagcattgaggaggattgccaaaa | | | |
| | gtatatcttgaagcagcagcaggaggaggctgag | | | |
| | aagcctttacaggtggccgctgtagacagcagtgt | | | |
| | cccacggacagcagagctggcgggcatcacca | | | |
| | cacttgatgaccccctggggcatatgcctgagcgtt | | | |
| | tcgatgccttcatctgctattgccccagcgacatc | | | |
| Linker | gtcgag | 1708 | VE | 1709 |
| CD40 | aaaaaggtggccaagaagccaaccaataaggc | 1710 | KKVAKKPTNKAPHPKQEPQEINF | 1711 |
| | cccccaccccaagcaggagccccaggagatca | | PDDLPGSNTAAPVQETLHGCQP | |
| | attttcccgacgatcttcctggctccaacactgctgct | | VTQEDGKESRISVQERQ | |
| | ccagtgcaggagactttacatggatgccaaccggt | | | |
| | cacccaggaggatggcaaagagagtcgcatctc | | | |
| | agtgcaggagagacag | | | |
| Linker | gtcgag | 1712 | VE | 1713 |
| FKBP_{V}′ | ggcgtccaagtcgaaaccattagtcccggcgatg | 1714 | GVQVETISPGDGRTFPKRGQTCV | 1715 |
| | gcagaacatttcctaaaaggggacaaacatgtgt | | VHYTGMLEDGKKVDSSRDRNKP | |
| | cgtccattatacaggcatgttggaggacggcaaa | | FKFMLGKQEVIRGWEEGVAQMS | |
| | aaggtggacagtagtaGaGAtcGcAAtAAa | | VGQRAKLTISPDYAYGATGHPGII | |
| | CCtTTcAAaTTcATGtTgGGaAAaCAa | | PPHATLVFDVELLKLE | |
| | GAaGTcATtaGgGGaTGGGAgGAgG | | | |
| | GcGTgGCtCAaATGtccGTcGGcCAac | | | |
| | GcGCtAAgCTcACcATcagcCCcGAcT | | | |
| | AcGCaTAcGGcGCtACcGGaCAtCCc | | | |
| | GGaATtATtCCcCCtCAcGCtACctTgG | | | |
| | TgTTtGAcGTcGAaCTgtTgAAgCTcGA | | | |
| | a | | | |
| Linker | gtcgag | 1716 | VE | 1717 |
| FKBP_{V} | ggagtgcaggtggagactatctccccaggagac | 1718 | GVQVETISPGDGRTFPKRGQTCV | 1719 |
| | gggcgcaccttccccaagcgcggccagacctgc | | VHYTGMLEDGKKVDSSRDRNKP | |
| | gtggtgcactacaccgggatgcttgaagatggaa | | FKFMLGKQEVIRGWEEGVAQMS | |
| | agaaagttgattcctcccgggacagaaacaagcc | | VGQRAKLTISPDYAYGATGHPGII | |
| | ctttaagtttatgctaggcaagcaggaggtgatccg | | PPHATLVFDVELLKLE | |
| | aggctgggaagaaggggttgcccagatgagtgtg | | | |
| | ggtcagagagccaaactgactatatctccagatta | | | |
| | tgcctatggtgccactgggcacccaggcatcatcc | | | |
| | caccacatgccactctcgtcttcgatgtggagcttct | | | |
| | aaaactggaa | | | |
| Linker | CCGCGG | 1720 | PR | 1721 |
| T2A | GAGGGCAGAGGCAGCCTCCTGAC | 1722 | EGRGSLLTCGDVEENPGP | 1723 |
| | ATGTGGGGACGTCGAGGAGAACC | | | |
| | CTGGCCCA | | | |
| Linker | CCTTGG | 1724 | PW | 1725 |
| Signal | ATGGAGTTCGGATTGAGCTGGCTG | 1726 | MEFGLSVVLFLVAILKGVQCSR | 1727 |
| Peptide | TTCCTGGTGGCAATACTCAAGGGC | | | |
| | GTTCAATGTTCACGG | | | |
| CD123 | CAGATCCAACTGGTGCAGTCAGGC | 1728 | QIQLVQSGPELKKPGETVKISCKA | 1729 |
| (32716) | CCGGAACTGAAGAAGCCAGGGGA | | SGYIFTNYGMNVVVKQAPGKSFK | |
| VH | GACAGTCAAAATAAGTTGTAAAGC | | WMGWINTYTGESTYSADFKGRF | |
| | CAGCGGCTACATATTTACTAATTAC | | AFSLETSASTAYLHINDLKNEDTA | |
| | GGGATGAATTGGGTGAAGCAAGC | | TYFCARSGGYDPMDYWGQGTS | |
| | GCCGGGCAAATCCTTTAAATGGAT | | VTV | |
| | GGGGTGGATAAACACATACACAGG | | | |
| | AGAGTCAACGTACAGCGCGGACTT | | | |
| | CAAAGGTCGATTCGCGTTCAGTCT | | | |
| | CGAGACCAGCGCGAGTACAGCTTA | | | |
| | CCTCCACATCAACGATCTTAAAAAC | | | |
| | GAAGACACGGCAACCTATTTTTGC | | | |
| | GCCCGGTCAGGCGGTTACGACCC | | | |
| | TATGGACTATTGGGGCCAAGGGAC | | | |
| | CTCCGTTACGGTA | | | |
| Flex | TCTTCAGGCGGTGGCGGGAGTGG | 1730 | SSGGGGSGGGGSGGGGS | 1731 |
| | TGGAGGAGGCTCAGGCGGCGGGG | | | |
| | GATCA | | | |
| CD123 | GACATCGTACTGACCCAATCTCCC | 1732 | DIVLTQSPASLAVSLGQRATISCR | 1733 |
| (32716) | GCTAGCCTTGCAGTATCCTTGGGT | | ASESVDNYGNTFMHVVYQQKPG | |
| VL | CAACGCGCTACAATAAGTTGCCGG | | QPPKLLIYRASNLESGIPARFSGS | |
| | GCTAGTGAGTCCGTAGACAACTAT | | GSRTDFTLTINPVEADDVATYYC | |
| | GGCAACACCTTCATGCATTGGTAC | | QQSNEDPPTFGAGTKLELKESKY | |
| | CAACAAAAACCAGGTCAGCCACCC | | GPPCP | |
| | AAACTTCTCATTTACAGAGCGTCTA | | | |
| | ATCTCGAAAGCGGCATCCCTGCTC | | | |
| | GATTCTCTGGAAGCGGAAGTAGAA | | | |
| | CCGACTTTACACTGACTATAAACCC | | | |
| | CGTCGAAGCCGATGATGTTGCCAC | | | |
| | TTATTACTGTCAACAGAGCAATGAG | | | |
| | GACCCACCGACATTCGGTGCTGGT | | | |
| | ACCAAGCTGGAGTTGAAGGAGTCA | | | |
| | AAATACGGGCCTCCCTGTCCC | | | |
| Linker | GGCTCC | 1734 | gs | 1735 |
| CD34 | GAGCTGCCAACCCAGGGAACTTTT | 1736 | ELPTQGTFSNVSTNVS | 1737 |
| epitope | TCAAATGTATCAACTAACGTCTCA | | | |
| CD8 stalk | CCCGCGCCACGACCACCAACACC | 1738 | PAPRPPTPAPTIASQPLSLRPEAC | 1739 |
| | AGCCCCAACCATTGCATCCCAGCC | | RPAAGGAVHTRGLDFACD | |
| | TTTGTCTCTCCGGCCCGAGGCTTG | | | |
| | TCGCCCCGCCGCCGGGGGTGCCG | | | |
| | TCCATACCCGAGGCCTGGACTTCG | | | |
| | CCTGCGAT | | | |
| CD8 | ATATATATTTGGGCTCCTCTGGCC | 1740 | IYIWAPLAGTCGVLLLSLVITLYCN | 1741 |
| trans- | GGTACCTGCGGCGTACTGCTCCTG | | HRNRRRVCKCPR | |
| membrane | TCACTGGTAATAACCCTGTATTGCA | | | |
| | ATCACAGGAACAGAAGGAGAGTCT | | | |
| | GTAAGTGCCCCCGC | | | |
| Linker | GTCGAC | 1742 | VD | 1743 |
| CD3ζ | AGAGTGAAGTTCAGCAGGAGCGCA | 1744 | RVKFSRSADAPAYQQGQNQLYN | 1745 |
| | GACGCCCCCGCGTACCAGCAGGG | | ELNLGRREEYDVLDKRRGRDPE | |
| | CCAGAACCAGCTCTATAACGAGCT | | MGGKPRRKNPQEGLYNELQKDK | |
| | CAATCTAGGACGAAGAGAGGAGTA | | MAEAYSEIGMKGERRRGKGHDG | |
| | CGATGTTTTGGACAAGAGACGTGG | | LYQGLSTATKDTYDALHMQALPP | |
| | CCGGGACCCTGAGATGGGGGGAA | | R | |
| | AGCCGAGAAGGAAGAACCCTCAG | | | |
| | GAAGGCCTGTACAATGAACTGCAG | | | |
| | AAAGATAAGATGGCGGAGGCCTAC | | | |
| | AGTGAGATTGGGATGAAAGGCGAG | | | |
| | CGCCGGAGGGGCAAGGGGCACGA | | | |
| | TGGCCTTTACCAGGGTCTCAGTAC | | | |
| | AGCCACCAAGGACACCTACGACGC | | | |
| | CCTTCACATGCAAGCTCTTCCACC | | | |
| | TCGT | | | |
| STOP | TGA | 1746 | stop | |

Appendix 20: pBP1327-pSFG-FRB.FKBPᵥ.ΔC9.2A-ΔCD19

| | | SEQ | | SEQ |
|---|---|---|---|---|
| Fragment | Nucleotide | ID NO: | Peptide | ID NO: |
| FRB | gaaatgTGGCATGAAGGGTTGGAAG | 1747 | EMWHEGLEEASRLYFGERNVKG | 1748 |
| | AAGCTTCAAGGCTGTACTTCGGAG | | MFEVLEPLHAMMERGPQTLKETS | |
| | AGAGGAACGTGAAGGGCATGTTTG | | FNQAYGRDLMEAQEWCRKYMK | |
| | AGGTTCTTGAACCTCTGCACGCCA | | SGNVKDLTQAVVDLYYHVFRRISK | |
| | TGATGGAACGGGGACCGCAGACA | | | |
| | CTGAAAGAAACCTCTTTTAATCAGG | | | |
| | CCTACGGCAGAGACCTGATGGAG | | | |
| | GCCCAAGAATGGTGTAGAAAGTAT | | | |
| | ATGAAATCCGGTAACGTGAAAGAC | | | |
| | CTGactCAGGCCTGGGACCTTTATT | | | |
| | ACCATGTGTTCAGGCGGATCAGTA | | | |
| | AG | | | |
| Linker | TCAGGCGGTGGCTCAGGT | 1749 | SGGGSG | 1750 |
| FKBP_{V} | GGcGTcCAaGTcGAaACcATtagtCCc | 1751 | GVQVETISPGDGRTFPKRGQTCV | 1752 |
| | GGcGAtGGcaGaACaTTtCCtAAaaGg | | VHYTGMLEDGKKVDSSRDRNKP | |
| | GGaCAaACaTGtGTcGTcCAtTAtACa | | FKFMLGKQEVIRGWEEGVAQMS | |
| | GGcATGtTgGAgGAcGGcAAaAAggT | | VGQRAKLTISPDYAYGATGHPGII | |
| | CGAcagtagtaGaGAtcGcAAtAAaCCtT | | PPHATLVFDVELLKL | |
| | TcAAaTTcATGtTgGGaAAaCAaGAaG | | | |
| | TcATtaGgGGaTGGGAgGAgGGcGTg | | | |
| | GCtCAaATGtccGTcGGcCAacGcGCt | | | |
| | AAgCTcACcATcagcCCcGAcTAcGCa | | | |
| | TAcGGcGCtACcGGaCAtCCcggaattA | | | |
| | TtCCcCCtCAcGCtACctTgGTgTTtGAc | | | |
| | GTcGAaCTgtTgAAgCTc | | | |
| Linker | TCGGGGGGCGGATCAGG | 1753 | SGGGS | 1754 |
| Δcaspase9 | GTCGACGGATTTGGTGATGTCGGT | 1755 | VDGFGDVGALESLRGNADLAYIL | 1756 |
| | GCTCTTGAGAGTTTGAGGGGAAAT | | SMEPCGHCLIINNVNFCRESGLR | |
| | GCAGATTTGGCTTACATCCTGAGC | | TRTGSNIDCEKLRRRFSSLHFMV | |
| | ATGGAGCCCTGTGGCCACTGCCTC | | EVKGDLTAKKMVLALLELARQDH | |
| | ATTATCAACAATGTGAACTTCTGCC | | GALDCCVVVILSHGCQASHLQFP | |
| | GTGAGTCCGGGCTCCGCACCCGC | | GAVYGTDGCPVSVEKIVNIFNGT | |
| | ACTGGCTCCAACATCGACTGTGAG | | SCPSLGGKPKLFFIQACGGEQKD | |
| | AAGTTGCGGCGTCGCTTCTCCTCG | | HGFEVASTSPEDESPGSNPEPDA | |
| | CTGCATTTCATGGTGGAGGTGAAG | | TPFQEGLRTFDQLDAISSLPTPSD | |
| | GGCGACCTGACTGCCAAGAAAATG | | IFVSYSTFPGFVSWRDPKSGSVVY | |
| | GTGCTGGCTTTGCTGGAGCTGGC | | VETLDDIFEQWAHSEDLQSLLLR | |
| | GCgGCAGGACCACGGTGCTCTGG | | VANAVSVKGIYKQMPGCFNFLRK | |
| | ACTGCTGCGTGGTGGTCATTCTCT | | KLFFKTSASRA | |
| | CTCACGGCTGTCAGGCCAGCCAC | | | |
| | CTGCAGTTCCCAGGGGCTGTCTAC | | | |
| | GGCACAGATGGATGCCCTGTGTCG | | | |
| | GTCGAGAAGATTGTGAACATCTTC | | | |
| | AATGGGACCAGCTGCCCCAGCCT | | | |
| | GGGAGGGAAGCCCAAGCTCTTTTT | | | |
| | CATCCAGGCCTGTGGTGGGGAGC | | | |
| | AGAAAGACCATGGGTTTGAGGTGG | | | |
| | CCTCCACTTCCCCTGAAGACGAGT | | | |
| | CCCCTGGCAGTAACCCCGAGCCA | | | |
| | GATGCCACCCCGTTCCAGGAAGGT | | | |
| | TTGAGGACCTTCGACCAGCTGGAC | | | |
| | GCCATATCTAGTTTGCCCACACCC | | | |
| | AGTGACATCTTTGTGTCCTACTCTA | | | |
| | CTTTCCCAGGTTTTGTTTCCTGGAG | | | |
| | GGACCCCAAGAGTGGCTCCTGGTA | | | |
| | CGTTGAGACCCTGGACGACATCTT | | | |
| | TGAGCAGTGGGCTCACTCTGAAGA | | | |
| | CCTGCAGTCCCTCCTGCTTAGGGT | | | |
| | CGCTAATGCTGTTTCGGTGAAAGG | | | |
| | GATTTATAAACAGATGCCTGGTTG | | | |
| | CTTTAATTTCCTCCGGAAAAAACTT | | | |
| | TTCTTTAAAACATCAGCTAGCAGAG | | | |
| | CC | | | |
| Linker | ccgcGG | 1757 | PR | 1758 |
| T2A | GAAGGCCGAGGGAGCCTGCTGAC | 1759 | EGRGSLLTCGDVEENPGP | 1760 |
| | ATGTGGCGATGTGGAGGAAAACCC | | | |
| | AGGACCA | | | |
| ΔCD19 | ATGCCACCACCTCGCCTGCTGTTC | 1761 | MPPPRLLFFLLFLTPMEVRPEEPL1762 | |
| | TTTCTGCTGTTCCTGACACCTATGG | | VVKVEEGDNAVLQCLKGTSDGPT | |
| | AGGTGCGACCTGAGGAACCACTG | | QQLTWSRESPLKPFLKLSLGLPG | |
| | GTCGTGAAGGTCGAGGAAGGCGA | | LGIHMRPLAIVVLFIFNVSQQMGGF | |
| | CAATGCCGTGCTGCAGTGCCTGAA | | YLCQPGPPSEKAWQPGVVTVNVE | |
| | AGGCACTTCTGATGGGCCAACTCA | | GSGELFRWNVSDLGGLGCGLKN | |
| | GCAGCTGACCTGGTCCAGGGAGT | | RSSEGPSSPSGKLMSPKLYVWA | |
| | CTCCCCTGAAGCCTTTTCTGAAACT | | KDRPEIVVEGEPPCLPPRDSLNQS | |
| | GAGCCTGGGACTGCCAGGACTGG | | LSQDLTMAPGSTLVVLSCGVPPD | |
| | GAATCCACATGCGCCCTCTGGCTA | | SVSRGPLSVVTHVHPKGPKSLLSL | |
| | TCTGGCTGTTCATCTTCAACGTGA | | ELKDDRPARDMVVVMETGLLLPR | |
| | GCCAGCAGATGGGAGGATTCTACC | | ATAQDAGKYYCHRGNLTMSFHL | |
| | TGTGCCAGCCAGGACCACCATCCG | | EITARPVLVVHVVLLRTGGVVKVSA | |
| | AGAAGGCCTGGCAGCCTGGATGG | | VTLAYLIFCLCSLVGILHLQRALVL | |
| | ACCGTCAACGTGGAGGGGTCTGG | | RRKRKRMTDPTRRF | |
| | AGAACTGTTTAGGTGGAATGTGAG | | | |
| | TGACCTGGGAGGACTGGGATGTG | | | |
| | GGCTGAAGAACCGCTCCTCTGAAG | | | |
| | GCCCAAGTTCACCCTCAGGGAAGC | | | |
| | TGATGAGCCCAAAACTGTACGTGT | | | |
| | GGGCCAAAGATCGGCCCGAGATC | | | |
| | TGGGAGGGAGAACCTCCATGCCT | | | |
| | GCCACCTAGAGACAGCCTGAATCA | | | |
| | GAGTCTGTCACAGGATCTGACAAT | | | |
| | GGCCCCCGGGTCCACTCTGTGGC | | | |
| | TGTCTTGTGGAGTCCCACCCGACA | | | |
| | GCGTGTCCAGAGGCCCTCTGTCCT | | | |
| | GGACCCACGTGCATCCTAAGGGG | | | |
| | CCAAAAAGTCTGCTGTCACTGGAA | | | |
| | CTGAAGGACGATCGGCCTGCCAG | | | |
| | AGACATGTGGGTCATGGAGACTGG | | | |
| | ACTGCTGCTGCCACGAGCAACCGC | | | |
| | ACAGGATGCTGGAAAATACTATTG | | | |
| | CCACCGGGGCAATCTGACAATGTC | | | |
| | CTTCCATCTGGAGATCACTGCAAG | | | |
| | GCCCGTGCTGTGGCACTGGCTGC | | | |
| | TGCGAACCGGAGGATGGAAGGTC | | | |
| | AGTGCTGTGACACTGGCATATCTG | | | |
| | ATCTTTTGCCTGTGCTCCCTGGTG | | | |
| | GGCATTCTGCATCTGCAGAGAGCC | | | |
| | CTGGTGCTGCGGAGAAAGAGAAA | | | |
| | GAGAATGACTGACCCAACAAGAAG | | | |
| | GTTT | | | |
| STOP | TGA | 1763 | stop | |

Appendix 21: pBP1328-pSFG-FKBPᵥ.FRB.ΔC9.2A-ΔCD19

| | | SEQ | | SEQ |
|---|---|---|---|---|
| Fragment | Nucleotide | ID NO: | Peptide | ID NO: |
| FKBP_{V} | GGcGTcCAaGTcGAaACcATtagtCCc | 1764 | GVQVETISPGDGRTFPKRGQTCV | 1765 |
| | GGcGAtGGcaGaACaTTtCCtAAaaGg | | VHYTGMLEDGKKVDSSRDRNKP | |
| | GGaCAaACaTGtGTcGTcCAtTAtACa | | FKFMLGKQEVIRGWEEGVAQMS | |
| | GGcATGtTgGAgGAcGGcAAaAAggT | | VGQRAKLTISPDYAYGATGHPGII | |
| | CGAcagtagtaGaGAtcGcAAtAAaCCtT | | PPHATLVFDVELLKL | |
| | TcAAaTTcATGtTgGGaAAaCAaGAaG | | | |
| | TcATtaGgGGaTGGGAgGAgGGcGTg | | | |
| | GCtCAaATGtccGTcGGcCAacGcGCt | | | |
| | AAgCTcACcATcagcCCcGAcTAcGCa | | | |
| | TAcGGcGCtACcGGaCAtCCcggaattA | | | |
| | TtCCcCCtCAcGCtACctTgGTgTTtGAc | | | |
| | GTcGAaCTgtTgAAgCTc | | | |
| Linker | TCGGGGGGCGGATCAGG | 1766 | SGGGS | 1767 |
| FRB | gaaatgTGGCATGAAGGGTTGGAAG | 1768 | EMWHEGLEEASRLYFGERNVKG | 1769 |
| | AAGCTTCAAGGCTGTACTTCGGAG | | MFEVLEPLHAMMERGPQTLKETS | |
| | AGAGGAACGTGAAGGGCATGTTTG | | FNQAYGRDLMEAQEWCRKYMK | |
| | AGGTTCTTGAACCTCTGCACGCCA | | SGNVKDLTQAVVDLYYHVFRRISK | |
| | TGATGGAACGGGGACCGCAGACA | | | |
| | CTGAAAGAAACCTCTTTTAATCAGG | | | |
| | CCTACGGCAGAGACCTGATGGAG | | | |
| | GCCCAAGAATGGTGTAGAAAGTAT | | | |
| | ATGAAATCCGGTAACGTGAAAGAC | | | |
| | CTGactCAGGCCTGGGACCTTTATT | | | |
| | ACCATGTGTTCAGGCGGATCAGTA | | | |
| | AG | | | |
| Linker | TCAGGCGGTGGCTCAGGT | 1770 | SGGGSG | 1771 |
| Δcaspase9 | GTCGACGGATTTGGTGATGTCGGT | 1772 | VDGFGDVGALESLRGNADLAYIL | 1773 |
| | GCTCTTGAGAGTTTGAGGGGAAAT | | SMEPCGHCLIINNVNFCRESGLR | |
| | GCAGATTTGGCTTACATCCTGAGC | | TRTGSNIDCEKLRRRFSSLHFMV | |
| | ATGGAGCCCTGTGGCCACTGCCTC | | EVKGDLTAKKMVLALLELARQDH | |
| | ATTATCAACAATGTGAACTTCTGCC | | GALDCCVVVILSHGCQASHLQFP | |
| | GTGAGTCCGGGCTCCGCACCCGC | | GAVYGTDGCPVSVEKIVNIFNGT | |
| | ACTGGCTCCAACATCGACTGTGAG | | SCPSLGGKPKLFFIQACGGEQKD | |
| | AAGTTGCGGCGTCGCTTCTCCTCG | | HGFEVASTSPEDESPGSNPEPDA | |
| | CTGCATTTCATGGTGGAGGTGAAG | | TPFQEGLRTFDQLDAISSLPTPSD | |
| | GGCGACCTGACTGCCAAGAAAATG | | IFVSYSTFPGFVSWRDPKSGSVVY | |
| | GTGCTGGCTTTGCTGGAGCTGGC | | VETLDDIFEQWAHSEDLQSLLLR | |
| | GCgGCAGGACCACGGTGCTCTGG | | VANAVSVKGIYKQMPGCFNFLRK | |
| | ACTGCTGCGTGGTGGTCATTCTCT | | KLFFKTSASRA | |
| | CTCACGGCTGTCAGGCCAGCCAC | | | |
| | CTGCAGTTCCCAGGGGCTGTCTAC | | | |
| | GGCACAGATGGATGCCCTGTGTCG | | | |
| | GTCGAGAAGATTGTGAACATCTTC | | | |
| | AATGGGACCAGCTGCCCCAGCCT | | | |
| | GGGAGGGAAGCCCAAGCTCTTTTT | | | |
| | CATCCAGGCCTGTGGTGGGGAGC | | | |
| | AGAAAGACCATGGGTTTGAGGTGG | | | |
| | CCTCCACTTCCCCTGAAGACGAGT | | | |
| | CCCCTGGCAGTAACCCCGAGCCA | | | |
| | GATGCCACCCCGTTCCAGGAAGGT | | | |
| | TTGAGGACCTTCGACCAGCTGGAC | | | |
| | GCCATATCTAGTTTGCCCACACCC | | | |
| | AGTGACATCTTTGTGTCCTACTCTA | | | |
| | CTTTCCCAGGTTTTGTTTCCTGGAG | | | |
| | GGACCCCAAGAGTGGCTCCTGGTA | | | |
| | CGTTGAGACCCTGGACGACATCTT | | | |
| | TGAGCAGTGGGCTCACTCTGAAGA | | | |
| | CCTGCAGTCCCTCCTGCTTAGGGT | | | |
| | CGCTAATGCTGTTTCGGTGAAAGG | | | |
| | GATTTATAAACAGATGCCTGGTTG | | | |
| | CTTTAATTTCCTCCGGAAAAAACTT | | | |
| | TTCTTTAAAACATCAGCTAGCAGAG | | | |
| | CC | | | |
| Linker | ccgcGG | 1774 | PR | 1775 |
| T2A | GAAGGCCGAGGGAGCCTGCTGAC | 1776 | EGRGSLLTCGDVEENPGP | 1777 |
| | ATGTGGCGATGTGGAGGAAAACCC | | | |
| | AGGACCA | | | |
| ΔCD19 | ATGCCACCACCTCGCCTGCTGTTC | 1778 | MPPPRLLFFLLFLTPMEVRPEEPL | 1779 |
| | TTTCTGCTGTTCCTGACACCTATGG | | VVKVEEGDNAVLQCLKGTSDGPT | |
| | AGGTGCGACCTGAGGAACCACTG | | QQLTWSRESPLKPFLKLSLGLPG | |
| | GTCGTGAAGGTCGAGGAAGGCGA | | LGIHMRPLAIVVLFIFNVSQQMGGF | |
| | CAATGCCGTGCTGCAGTGCCTGAA | | YLCQPGPPSEKAWQPGVVTVNVE | |
| | AGGCACTTCTGATGGGCCAACTCA | | GSGELFRWNVSDLGGLGCGLKN | |
| | GCAGCTGACCTGGTCCAGGGAGT | | RSSEGPSSPSGKLMSPKLYVWA | |
| | CTCCCCTGAAGCCTTTTCTGAAACT | | KDRPEIVVEGEPPCLPPRDSLNQS | |
| | GAGCCTGGGACTGCCAGGACTGG | | LSQDLTMAPGSTLVVLSCGVPPD | |
| | GAATCCACATGCGCCCTCTGGCTA | | SVSRGPLSVVTHVHPKGPKSLLSL | |
| | TCTGGCTGTTCATCTTCAACGTGA | | ELKDDRPARDMVVVMETGLLLPR | |
| | GCCAGCAGATGGGAGGATTCTACC | | ATAQDAGKYYCHRGNLTMSFHL | |
| | TGTGCCAGCCAGGACCACCATCCG | | EITARPVLVVHVVLLRTGGVVKVSA | |
| | AGAAGGCCTGGCAGCCTGGATGG | | VTLAYLIFCLCSLVGILHLQRALVL | |
| | ACCGTCAACGTGGAGGGGTCTGG | | RRKRKRMTDPTRRF | |
| | AGAACTGTTTAGGTGGAATGTGAG | | | |
| | TGACCTGGGAGGACTGGGATGTG | | | |
| | GGCTGAAGAACCGCTCCTCTGAAG | | | |
| | GCCCAAGTTCACCCTCAGGGAAGC | | | |
| | TGATGAGCCCAAAACTGTACGTGT | | | |
| | GGGCCAAAGATCGGCCCGAGATC | | | |
| | TGGGAGGGAGAACCTCCATGCCT | | | |
| | GCCACCTAGAGACAGCCTGAATCA | | | |
| | GAGTCTGTCACAGGATCTGACAAT | | | |
| | GGCCCCCGGGTCCACTCTGTGGC | | | |
| | TGTCTTGTGGAGTCCCACCCGACA | | | |
| | GCGTGTCCAGAGGCCCTCTGTCCT | | | |
| | GGACCCACGTGCATCCTAAGGGG | | | |
| | CCAAAAAGTCTGCTGTCACTGGAA | | | |
| | CTGAAGGACGATCGGCCTGCCAG | | | |
| | AGACATGTGGGTCATGGAGACTGG | | | |
| | ACTGCTGCTGCCACGAGCAACCGC | | | |
| | ACAGGATGCTGGAAAATACTATTG | | | |
| | CCACCGGGGCAATCTGACAATGTC | | | |
| | CTTCCATCTGGAGATCACTGCAAG | | | |
| | GCCCGTGCTGTGGCACTGGCTGC | | | |
| | TGCGAACCGGAGGATGGAAGGTC | | | |
| | AGTGCTGTGACACTGGCATATCTG | | | |
| | ATCTTTTGCCTGTGCTCCCTGGTG | | | |
| | GGCATTCTGCATCTGCAGAGAGCC | | | |
| | CTGGTGCTGCGGAGAAAGAGAAA | | | |
| | GAGAATGACTGACCCAACAAGAAG | | | |
| | GTTT | | | |
| STOP | TGA | 1780 | stop | |

Appendix 22: pBP1351-pSFG-SP163.FKBP.FRB.ΔC9. T2A-αhPSCA.Q.CD8stm.ζ.2A-iMC

| | | SEQ | | SEQ |
|---|---|---|---|---|
| | | ID | | ID |
| Fragment | Nucleotide | NO: | Peptide | NO: |
| QBI SP163 | AGCGCAGAGGCTTGGGGCAGCCG | 1781 | AQRLGAAERQPGPGPGLGSRRE | 1782 |
| | AGCGGCAGCCAGGCCCCGGCCCG | | RSPPRRARERAASQSEPERERE | |
| | GGCCTCGGTTCCAGAAGGGAGAG | | PRRPRTASET | |
| | GAGCCCGCCAAGGCGCGCAAGAG | | | |
| | AGCGGGCTGCCTCGCAGTCCGAG | | | |
| | CCGGAGAGGGAGCGCGAGCCGCG | | | |
| | CCGGCCCCGGACGGCCTCCGAAA | | | |
| | CC | | | |
| FKBP″ | GGcGTGCAaGTGGAaACTATaAGCC | 1783 | GVQVETISPGDGRTFPKRGQTCV | 1784 |
| | CgGGAGAcGGCcGcACATTtCCCAA | | VHYTGMLEDGKKFDSSRDRNKP | |
| | gAGAGGcCAGACcTGCGTgGTGCAc | | FKFMLGKQEVIRGWEEGVAQMS | |
| | TATACaGGAATGCTGGAgGACGGg | | VGQRAKLTISPDYAYGATGHPGII | |
| | AAGAAaTTCGAtAGCtcCCGGGAtCG | | PPHATLVFDVELLKLE | |
| | AAAtAAGCCtTTCAAaTTCATGCTGG | | | |
| | GcAAGCAaGAAGTcATCaGaGGCTG | | | |
| | GGAaGAAGGcGTCGCcCAGATGTC | | | |
| | cGTGGGtCAGcGcGCCAAgCTGACa | | | |
| | ATTAGtCCAGAtTACGCcTATGGcGC | | | |
| | AACaGGCCAtCCCGGcATCATcCCC | | | |
| | CCaCATGCcACACTcGTCTTtGATGT | | | |
| | cGAGCTcCTGAAaCTGGAg | | | |
| Linker | GGCGGGcaattg | 1785 | ggql | 1786 |
| FRB | gaaatgTGGCATGAAGGGTTGGAAG | 1787 | EMWHEGLEEASRLYFGERNVKG | 1788 |
| | AAGCTTCAAGGCTGTACTTCGGAG | | MFEVLEPLHAMMERGPQTLKETS | |
| | AGAGGAACGTGAAGGGCATGTTTG | | FNQAYGRDLMEAQEWCRKYMK | |
| | AGGTTCTTGAACCTCTGCACGCCA | | SGNVKDLTQAVVDLYYHVFRRISK | |
| | TGATGGAACGGGGACCGCAGACA | | | |
| | CTGAAAGAAACCTCTTTTAATCAGG | | | |
| | CCTACGGCAGAGACCTGATGGAG | | | |
| | GCCCAAGAATGGTGTAGAAAGTAT | | | |
| | ATGAAATCCGGTAACGTGAAAGAC | | | |
| | CTGactCAGGCCTGGGACCTTTATT | | | |
| | ACCATGTGTTCAGGCGGATCAGTA | | | |
| | AG | | | |
| Linker | TCAGGCGGTGGCTCAGGTccatgg | 1789 | SGGGSGPW | 1790 |
| Δcaspase9 | GGATTTGGTGATGTCGGTGCTCTT | 1791 | GFGDVGALESLRGNADLAYILSM | 1792 |
| | GAGAGTTTGAGGGGAAATGCAGAT | | EPCGHCLIINNVNFCRESGLRTRT | |
| | TTGGCTTACATCCTGAGCATGGAG | | GSNIDCEKLRRRFSSLHFMVEVK | |
| | CCCTGTGGCCACTGCCTCATTATC | | GDLTAKKMVLALLELARQDHGAL | |
| | AACAATGTGAACTTCTGCCGTGAG | | DCCVVVILSHGCQASHLQFPGAV | |
| | TCCGGGCTCCGCACCCGCACTGG | | YGTDGCPVSVEKIVNIFNGTSCPS | |
| | CTCCAACATCGACTGTGAGAAGTT | | LGGKPKLFFIQACGGEQKDHGFE | |
| | GCGGCGTCGCTTCTCCTCGCTGCA | | VASTSPEDESPGSNPEPDATPFQ | |
| | TTTCATGGTGGAGGTGAAGGGCGA | | EGLRTFDQLDAISSLPTPSDIFVS | |
| | CCTGACTGCCAAGAAAATGGTGCT | | YSTFPGFVSVVRDPKSGSVVYVET | |
| | GGCTTTGCTGGAGCTGGCGCgGCA | | LDDIFEQWAHSEDLQSLLLRVAN | |
| | GGACCACGGTGCTCTGGACTGCT | | AVSVKGIYKQMPGCFNFLRKKLF | |
| | GCGTGGTGGTCATTCTCTCTCACG | | FKTSASRA | |
| | GCTGTCAGGCCAGCCACCTGCAGT | | | |
| | TCCCAGGGGCTGTCTACGGCACA | | | |
| | GATGGATGCCCTGTGTCGGTCGAG | | | |
| | AAGATTGTGAACATCTTCAATGGG | | | |
| | ACCAGCTGCCCCAGCCTGGGAGG | | | |
| | GAAGCCCAAGCTCTTTTTCATCCA | | | |
| | GGCCTGTGGTGGGGAGCAGAAAG | | | |
| | AtCATGGGTTTGAGGTGGCCTCCA | | | |
| | CTTCCCCTGAAGACGAGTCCCCTG | | | |
| | GCAGTAACCCCGAGCCAGATGCCA | | | |
| | CCCCGTTCCAGGAAGGTTTGAGGA | | | |
| | CCTTCGACCAGCTGGACGCCATAT | | | |
| | CTAGTTTGCCCACACCCAGTGACA | | | |
| | TCTTTGTGTCCTACTCTACTTTCCC | | | |
| | AGGTTTTGTTTCCTGGAGGGACCC | | | |
| | CAAGAGTGGCTCCTGGTACGTTGA | | | |
| | GACCCTGGACGACATCTTTGAGCA | | | |
| | GTGGGCTCACTCTGAAGACCTGCA | | | |
| | GTCCCTCCTGCTTAGGGTCGCTAA | | | |
| | TGCTGTTTCGGTGAAAGGGATTTA | | | |
| | TAAACAGATGCCTGGTTGCTTTAAT | | | |
| | TTCCTCCGGAAAAAACTTTTCTTTA | | | |
| | AAACATCAGCTAGCAGAGCC | | | |
| Linker | ggatctggaccgcGG | 1793 | GSGPR | 1794 |
| T2A | GAAGGCCGAGGGAGCCTGCTGAC | 1795 | EGRGSLLTCGDVEENPGP | 1796 |
| | ATGTGGCGATGTGGAGGAAAACCC | | | |
| | AGGACCA | | | |
| Linker | CCATGG | 1797 | PW | 1798 |
| Signal | ATGGAGTTTGGACTTTCTTGGTTGT | 1799 | MEFGLSVVLFLVAILKGVQCSR | 1800 |
| Peptide | TTTTGGTGGCAATTCTGAAGGGTG | | | |
| | TCCAGTGTAGCAGG | | | |
| PSCA(A11) | GACATCCAACTGACGCAAAGCCCA | 1801 | DIQLTQSPSTLSASMGDRVTITCS | 1802 |
| VL | TCTACACTCAGCGCTAGCATGGGG | | ASSSVRFIHVVYQQKPGKAPKRLI | |
| | GACAGGGTCACAATCACGTGCTCT | | YDTSKLASGVPSRFSGSGSGTDF | |
| | GCCTCAAGTTCCGTTAGGTTTATC | | TLTISSLQPEDFATYYCQQWGSS | |
| | CATTGGTATCAGCAGAAACCTGGA | | PFTFGQGTKVEIK | |
| | AAGGCCCCAAAAAGACTGATCTAT | | | |
| | GATACCAGCAAGCTGGCTTCCGGA | | | |
| | GTGCCCTCAAGGTTCTCAGGATCT | | | |
| | GGCAGTGGGACCGATTTCACCCTG | | | |
| | ACAATTAGCAGCCTTCAGCCAGAG | | | |
| | GATTTCGCAACCTATTACTGTCAGC | | | |
| | AATGGGGGTCCAGCCCATTCACTT | | | |
| | TCGGCCAAGGAACAAAGGTGGAG | | | |
| | ATAAAA | | | |
| Flex | GGCGGAGGAAGCGGAGGTGGGG | 1803 | gggsgggg | 1804 |
| | GC | | | |
| PSCA(A11) | GAGGTGCAGCTCGTGGAGTATGG | 1805 | EVQLVEYGGGLVQPGGSLRLSC | 1806 |
| VH | CGGGGGCCTGGTGCAGCCTGGGG | | AASGFNIKDYYIHVVVRQAPGKGL | |
| | GTAGTCTGAGGCTCTCCTGCGCTG | | EVVVAWIDPENGDTEFVPKFQGR | |
| | CCTCTGGCTTTAACATTAAAGACTA | | ATMSADTSKNTAYLQMNSLRAED | |
| | CTACATACATTGGGTGCGGCAGGC | | TAVYYCKTGGFWGQGTLVTVSS | |
| | CCCAGGCAAAGGGCTCGAATGGG | | | |
| | TGGCCTGGATTGACCCTGAGAATG | | | |
| | GTGACACTGAGTTTGTCCCCAAGT | | | |
| | TTCAGGGCAGAGCCACCATGAGC | | | |
| | GCTGACACAAGCAAAAACACTGCT | | | |
| | TATCTCCAAATGAATAGCCTGCGA | | | |
| | GCTGAAGATACAGCAGTCTATTAC | | | |
| | TGCAAGACGGGAGGATTCTGGGG | | | |
| | CCAGGGAACTCTGGTGACAGTTAG | | | |
| | TTCC | | | |
| Linker | GGATCC | 1807 | gs | 1808 |
| CD34 | GAACTTCCTACTCAGGGGACTTTC | 1809 | ELPTQGTFSNVSTNVS | 1810 |
| epitope | TCAAACGTTAGCACAAACGTAAGT | | | |
| CD8 stalk | CCCGCCCCAAGACCCCCCACACCT | 1811 | PAPRPPTPAPTIASQPLSLRPEAC | 1812 |
| | GCGCCGACCATTGCTTCTCAACCC | | RPAAGGAVHTRGLDFACD | |
| | CTGAGTTTGAGACCCGAGGCCTGC | | | |
| | CGGCCAGCTGCCGGCGGGGCCGT | | | |
| | GCATACAAGAGGACTCGATTTCGC | | | |
| | TTGCGAC | | | |
| CD8 | ATCTATATCTGGGCACCTCTCGCT | 1813 | IYIWAPLAGTCGVLLLSLVITLYCN | 1814 |
| trans- | GGCACCTGTGGAGTCCTTCTGCTC | | HRNRRRVCKCPR | |
| membrane | AGCCTGGTTATTACTCTGTACTGTA | | | |
| | ATCACCGGAATCGCCGCCGCGTTT | | | |
| | GTAAGTGTCCCAGG | | | |
| Linker | GTCGAC | 1815 | VD | 1816 |
| CD3ζ | AGAGTGAAGTTCAGCAGGAGCGCA | 1817 | RVKFSRSADAPAYQQGQNQLYN | 1818 |
| | GACGCCCCCGCGTACCAGCAGGG | | ELNLGRREEYDVLDKRRGRDPE | |
| | CCAGAACCAGCTCTATAACGAGCT | | MGGKPRRKNPQEGLYNELQKDK | |
| | CAATCTAGGACGAAGAGAGGAGTA | | MAEAYSEIGMKGERRRGKGHDG | |
| | CGATGTTTTGGACAAGAGACGTGG | | LYQGLSTATKDTYDALHMQALPP | |
| | CCGGGACCCTGAGATGGGGGGAA | | R | |
| | AGCCGAGAAGGAAGAACCCTCAG | | | |
| | GAAGGCCTGTACAATGAACTGCAG | | | |
| | AAAGATAAGATGGCGGAGGCCTAC | | | |
| | AGTGAGATTGGGATGAAAGGCGAG | | | |
| | CGCCGGAGGGGCAAGGGGCACGA | | | |
| | TGGCCTTTACCAGGGTCTCAGTAC | | | |
| | AGCCACCAAGGACACCTACGACGC | | | |
| | CCTTCACATGCAAGCTCTTCCACC | | | |
| | TCGT | | | |
| Linker | gGAACGCGTGGATCGGGA | 1819 | gtrgsg | 1820 |
| P2A | GCTACTAACTTCAGCCTGCTGAAG | 1821 | ATNFSLLKQAGDVEENPGP | 1822 |
| | CAGGCTGGAGACGTGGAGGAGAA | | | |
| | Ccccgggcct | | | |
| MyD88 | atggctgcaggaggtcccggcgcggggtctgcgg | 1823 | MAAGGPGAGSAAPVSSTSSLPLA | 1824 |
| | ccccggtctcctccacatcctcccttcccctggctgc | | ALNMRVRRRLSLFLNVRTQVAAD | |
| | tctcaacatgcgagtgcggcgccgcctgtctctgtt | | WTALAEEMDFEYLEIRQLETQAD | |
| | cttgaacgtgcggacacaggtggcggccgactgg | | PTGRLLDAWQGRPGASVGRLLD | |
| | accgcgctggcggaggagatggactttgagtactt | | LLTKLGRDDVLLELGPSIEEDCQK | |
| | ggagatccggcaactggagacacaagcggacc | | YILKQQQEEAEKPLQVAAVDSSV | |
| | ccactggcaggctgctggacgcctggcagggac | | PRTAELAGITTLDDPLGHMPERF | |
| | gccctggcgcctctgtaggccgactgctcgatctgc | | DAFICYCPSDI | |
| | ttaccaagctgggccgcgacgacgtgctgctgga | | | |
| | gctgggacccagcattgaggaggattgccaaaa | | | |
| | gtatatcttgaagcagcagcaggaggaggctgag | | | |
| | aagcctttacaggtggccgctgtagacagcagtgt | | | |
| | cccacggacagcagagctggcgggcatcacca | | | |
| | cacttgatgaccccctggggcatatgcctgagcgtt | | | |
| | tcgatgccttcatctgctattgccccagcgacatc | | | |
| Linker | gtcgag | 1825 | VE | 1826 |
| CD40 | aaaaaggtggccaagaagccaaccaataaggc | 1827 | KKVAKKPTNKAPHPKQEPQEINF | 1828 |
| | cccccaccccaagcaggagccccaggagatca | | PDDLPGSNTAAPVQETLHGCQP | |
| | attttcccgacgatcttcctggctccaacactgctgct | | VTQEDGKESRISVQERQ | |
| | ccagtgcaggagactttacatggatgccaaccggt | | | |
| | cacccaggaggatggcaaagagagtcgcatctc | | | |
| | agtgcaggagagacag | | | |
| Linker | gtcgag | 1829 | VE | 1830 |
| FKBP_{V}′ | GGcGTcCAaGTcGAaACcATtagtCCc | 1831 | GVQVETISPGDGRTFPKRGQTCV | 1832 |
| | GGcGAtGGcaGaACaTTtCCtAAaaGg | | VHYTGMLEDGKKVDSSRDRNKP | |
| | GGaCAaACaTGtGTcGTcCAtTAtACa | | FKFMLGKQEVIRGWEEGVAQMS | |
| | GGcATGtTgGAgGAcGGcAAaAAgGT | | VGQRAKLTISPDYAYGATGHPGII | |
| | gGAcagtagtaGaGAtcGcAAtAAaCCtT | | PPHATLVFDVELLKLE | |
| | TcAAaTTcATGtTgGGaAAaCAaGAaG | | | |
| | TcATtaGgGGaTGGGAgGAgGGcGTg | | | |
| | GCtCAaATGtccGTcGGcCAacGcGCt | | | |
| | AAgCTcACcATcagcCCcGAcTAcGCa | | | |
| | TAcGGcGCtACcGGaCAtCCcGGaATt | | | |
| | ATtCCcCCtCAcGCtACctTgGTgTTtG | | | |
| | AcGTcGAaCTgtTgAAgCTcGAa | | | |
| Linker | gtcgag | 1833 | VE | 1834 |
| FKBP_{V} | ggagtgcaggtggagactatctccccaggagac | 1835 | GVQVETISPGDGRTFPKRGQTCV | 1836 |
| | gggcgcaccttccccaagcgcggccagacctgc | | VHYTGMLEDGKKVDSSRDRNKP | |
| | gtggtgcactacaccgggatgcttgaagatggaa | | FKFMLGKQEVIRGWEEGVAQMS | |
| | agaaagttgattcctcccgggacagaaacaagcc | | VGQRAKLTISPDYAYGATGHPGII | |
| | ctttaagtttatgctaggcaagcaggaggtgatccg | | PPHATLVFDVELLKLE | |
| | aggctgggaagaaggggttgcccagatgagtgtg | | | |
| | ggtcagagagccaaactgactatatctccagatta | | | |
| | tgcctatggtgccactgggcacccaggcatcatcc | | | |
| | caccacatgccactctcgtcttcgatgtggagcttct | | | |
| | aaaactggaa | | | |
| STOP | TGA | 1837 | stop | |

Appendix 23: pBP1373-pSFG-sp-FKBP.FRB.ΔC9.T2A-αhPSCAscFv.Q.CD8stm.ζ

| | | SEQ | | SEQ |
|---|---|---|---|---|
| Fragment | Nucleotide | ID NO: | Peptide | ID NO: |
| QBI SP163 | AGCGCAGAGGCTTGGGGCAGCCG | 1838 | AQRLGAAERQPGPGPGLGSRRE | 1839 |
| | AGCGGCAGCCAGGCCCCGGCCCG | | RSPPRRARERAASQSEPERERE | |
| | GGCCTCGGTTCCAGAAGGGAGAG | | PRRPRTASET | |
| | GAGCCCGCCAAGGCGCGCAAGAG | | | |
| | AGCGGGCTGCCTCGCAGTCCGAG | | | |
| | CCGGAGAGGGAGCGCGAGCCGCG | | | |
| | CCGGCCCCGGACGGCCTCCGAAA | | | |
| | CC | | | |
| FKBP″ | GGcGTGCAaGTGGAaACTATaAGCC | 1840 | GVQVETISPGDGRTFPKRGQTCV | 1841 |
| | CgGGAGAcGGCcGcACATTtCCCAA | | VHYTGMLEDGKKFDSSRDRNKP | |
| | gAGAGGcCAGACcTGCGTgGTGCAc | | FKFMLGKQEVIRGWEEGVAQMS | |
| | TATACaGGAATGCTGGAgGACGGg | | VGQRAKLTISPDYAYGATGHPGII | |
| | AAGAAaTTCGAtAGCtcCCGGGAtCG | | PPHATLVFDVELLKLE | |
| | AAAtAAGCCtTTCAAaTTCATGCTGG | | | |
| | GcAAGCAaGAAGTcATCaGaGGCTG | | | |
| | GGAaGAAGGcGTCGCcCAGATGTC | | | |
| | cGTGGGtCAGcGcGCCAAgCTGACa | | | |
| | ATTAGtCCAGAtTACGCcTATGGcGC | | | |
| | AACaGGCCAtCCCGGcATCATcCCC | | | |
| | CCaCATGCcACACTcGTCTTtGATGT | | | |
| | cGAGCTcCTGAAaCTGGAg | | | |
| Linker | GGCGGGcaattg | 1842 | ggql | 1843 |
| FRB | gaaatgTGGCATGAAGGGTTGGAAG | 1844 | EMWHEGLEEASRLYFGERNVKG | 1845 |
| | AAGCTTCAAGGCTGTACTTCGGAG | | MFEVLEPLHAMMERGPQTLKETS | |
| | AGAGGAACGTGAAGGGCATGTTTG | | FNQAYGRDLMEAQEWCRKYMK | |
| | AGGTTCTTGAACCTCTGCACGCCA | | SGNVKDLTQAVVDLYYHVFRRISK | |
| | TGATGGAACGGGGACCGCAGACA | | | |
| | CTGAAAGAAACCTCTTTTAATCAGG | | | |
| | CCTACGGCAGAGACCTGATGGAG | | | |
| | GCCCAAGAATGGTGTAGAAAGTAT | | | |
| | ATGAAATCCGGTAACGTGAAAGAC | | | |
| | CTGactCAGGCCTGGGACCTTTATT | | | |
| | ACCATGTGTTCAGGCGGATCAGTA | | | |
| | AG | | | |
| Linker | TCAGGCGGTGGCTCAGGTccatgg | 1846 | SGGGSGPW | 1847 |
| Δcaspase9 | GGATTTGGTGATGTCGGTGCTCTT | 1848 | GFGDVGALESLRGNADLAYILSM | 1849 |
| | GAGAGTTTGAGGGGAAATGCAGAT | | EPCGHCLIINNVNFCRESGLRTRT | |
| | TTGGCTTACATCCTGAGCATGGAG | | GSNIDCEKLRRRFSSLHFMVEVK | |
| | CCCTGTGGCCACTGCCTCATTATC | | GDLTAKKMVLALLELARQDHGAL | |
| | AACAATGTGAACTTCTGCCGTGAG | | DCCVVVILSHGCQASHLQFPGAV | |
| | TCCGGGCTCCGCACCCGCACTGG | | YGTDGCPVSVEKIVNIFNGTSCPS | |
| | CTCCAACATCGACTGTGAGAAGTT | | LGGKPKLFFIQACGGEQKDHGFE | |
| | GCGGCGTCGCTTCTCCTCGCTGCA | | VASTSPEDESPGSNPEPDATPFQ | |
| | TTTCATGGTGGAGGTGAAGGGCGA | | EGLRTFDQLDAISSLPTPSDIFVS | |
| | CCTGACTGCCAAGAAAATGGTGCT | | YSTFPGFVSVVRDPKSGSVVYVET | |
| | GGCTTTGCTGGAGCTGGCGCgGCA | | LDDIFEQWAHSEDLQSLLLRVAN | |
| | GGACCACGGTGCTCTGGACTGCT | | AVSVKGIYKQMPGCFNFLRKKLF | |
| | GCGTGGTGGTCATTCTCTCTCACG | | FKTSASRA | |
| | GCTGTCAGGCCAGCCACCTGCAGT | | | |
| | TCCCAGGGGCTGTCTACGGCACA | | | |
| | GATGGATGCCCTGTGTCGGTCGAG | | | |
| | AAGATTGTGAACATCTTCAATGGG | | | |
| | ACCAGCTGCCCCAGCCTGGGAGG | | | |
| | GAAGCCCAAGCTCTTTTTCATCCA | | | |
| | GGCCTGTGGTGGGGAGCAGAAAG | | | |
| | AtCATGGGTTTGAGGTGGCCTCCA | | | |
| | CTTCCCCTGAAGACGAGTCCCCTG | | | |
| | GCAGTAACCCCGAGCCAGATGCCA | | | |
| | CCCCGTTCCAGGAAGGTTTGAGGA | | | |
| | CCTTCGACCAGCTGGACGCCATAT | | | |
| | CTAGTTTGCCCACACCCAGTGACA | | | |
| | TCTTTGTGTCCTACTCTACTTTCCC | | | |
| | AGGTTTTGTTTCCTGGAGGGACCC | | | |
| | CAAGAGTGGCTCCTGGTACGTTGA | | | |
| | GACCCTGGACGACATCTTTGAGCA | | | |
| | GTGGGCTCACTCTGAAGACCTGCA | | | |
| | GTCCCTCCTGCTTAGGGTCGCTAA | | | |
| | TGCTGTTTCGGTGAAAGGGATTTA | | | |
| | TAAACAGATGCCTGGTTGCTTTAAT | | | |
| | TTCCTCCGGAAAAAACTTTTCTTTA | | | |
| | AAACATCAGCTAGCAGAGCC | | | |
| Linker | ggatctggaccgcGG | 1850 | GSGPR | 1851 |
| T2A | GAAGGCCGAGGGAGCCTGCTGAC | 1852 | EGRGSLLTCGDVEENPGP | 1853 |
| | ATGTGGCGATGTGGAGGAAAACCC | | | |
| | AGGACCA | | | |
| Linker | CCATGG | 1854 | PW | 1855 |
| Signal | ATGGAGTTTGGACTTTCTTGGTTGT | 1856 | MEFGLSVVLFLVAILKGVQCSR | 1857 |
| Peptide | TTTTGGTGGCAATTCTGAAGGGTG | | | |
| | TCCAGTGTAGCAGG | | | |
| PSCA(A11) | GACATCCAACTGACGCAAAGCCCA | 1858 | DIQLTQSPSTLSASMGDRVTITCS | 1859 |
| VL | TCTACACTCAGCGCTAGCATGGGG | | ASSSVRFIHVVYQQKPGKAPKRLI | |
| | GACAGGGTCACAATCACGTGCTCT | | YDTSKLASGVPSRFSGSGSGTDF | |
| | GCCTCAAGTTCCGTTAGGTTTATC | | TLTISSLQPEDFATYYCQQWGSS | |
| | CATTGGTATCAGCAGAAACCTGGA | | PFTFGQGTKVEIK | |
| | AAGGCCCCAAAAAGACTGATCTAT | | | |
| | GATACCAGCAAGCTGGCTTCCGGA | | | |
| | GTGCCCTCAAGGTTCTCAGGATCT | | | |
| | GGCAGTGGGACCGATTTCACCCTG | | | |
| | ACAATTAGCAGCCTTCAGCCAGAG | | | |
| | GATTTCGCAACCTATTACTGTCAGC | | | |
| | AATGGGGGTCCAGCCCATTCACTT | | | |
| | TCGGCCAAGGAACAAAGGTGGAG | | | |
| | ATAAAA | | | |
| Flex | GGCGGAGGAAGCGGAGGTGGGG | 1860 | gggsgggg | 1861 |
| | GC | | | |
| PSCA(A11) | GAGGTGCAGCTCGTGGAGTATGG | 1862 | EVQLVEYGGGLVQPGGSLRLSC | 1863 |
| VH | CGGGGGCCTGGTGCAGCCTGGGG | | AASGFNIKDYYIHVVVRQAPGKGL | |
| | GTAGTCTGAGGCTCTCCTGCGCTG | | EVVVAWIDPENGDTEFVPKFQGR | |
| | CCTCTGGCTTTAACATTAAAGACTA | | ATMSADTSKNTAYLQMNSLRAED | |
| | CTACATACATTGGGTGCGGCAGGC | | TAVYYCKTGGFWGQGTLVTVSS | |
| | CCCAGGCAAAGGGCTCGAATGGG | | | |
| | TGGCCTGGATTGACCCTGAGAATG | | | |
| | GTGACACTGAGTTTGTCCCCAAGT | | | |
| | TTCAGGGCAGAGCCACCATGAGC | | | |
| | GCTGACACAAGCAAAAACACTGCT | | | |
| | TATCTCCAAATGAATAGCCTGCGA | | | |
| | GCTGAAGATACAGCAGTCTATTAC | | | |
| | TGCAAGACGGGAGGATTCTGGGG | | | |
| | CCAGGGAACTCTGGTGACAGTTAG | | | |
| | TTCC | | | |
| Linker | GGATCC | 1864 | gs | 1865 |
| CD34 | GAACTTCCTACTCAGGGGACTTTC | 1866 | ELPTQGTFSNVSTNVS | 1867 |
| epitope | TCAAACGTTAGCACAAACGTAAGT | | | |
| CD8 stalk | CCCGCCCCAAGACCCCCCACACCT | 1868 | PAPRPPTPAPTIASQPLSLRPEAC | 1869 |
| | GCGCCGACCATTGCTTCTCAACCC | | RPAAGGAVHTRGLDFACD | |
| | CTGAGTTTGAGACCCGAGGCCTGC | | | |
| | CGGCCAGCTGCCGGCGGGGCCGT | | | |
| | GCATACAAGAGGACTCGATTTCGC | | | |
| | TTGCGAC | | | |
| CD8 | ATCTATATCTGGGCACCTCTCGCT | 1870 | IYIWAPLAGTCGVLLLSLVITLYCN | 1871 |
| trans- | GGCACCTGTGGAGTCCTTCTGCTC | | HRNRRRVCKCPR | |
| membrane | AGCCTGGTTATTACTCTGTACTGTA | | | |
| | ATCACCGGAATCGCCGCCGCGTTT | | | |
| | GTAAGTGTCCCAGG | | | |
| Linker | GTCGAC | 1872 | VD | 1873 |
| CD3ζ | AGAGTGAAGTTCAGCAGGAGCGCA | 1874 | RVKFSRSADAPAYQQGQNQLYN | 1875 |
| | GACGCCCCCGCGTACCAGCAGGG | | ELNLGRREEYDVLDKRRGRDPE | |
| | CCAGAACCAGCTCTATAACGAGCT | | MGGKPRRKNPQEGLYNELQKDK | |
| | CAATCTAGGACGAAGAGAGGAGTA | | MAEAYSEIGMKGERRRGKGHDG | |
| | CGATGTTTTGGACAAGAGACGTGG | | LYQGLSTATKDTYDALHMQALPP | |
| | CCGGGACCCTGAGATGGGGGGAA | | R | |
| | AGCCGAGAAGGAAGAACCCTCAG | | | |
| | GAAGGCCTGTACAATGAACTGCAG | | | |
| | AAAGATAAGATGGCGGAGGCCTAC | | | |
| | AGTGAGATTGGGATGAAAGGCGAG | | | |
| | CGCCGGAGGGGCAAGGGGCACGA | | | |
| | TGGCCTTTACCAGGGTCTCAGTAC | | | |
| | AGCCACCAAGGACACCTACGACGC | | | |
| | CCTTCACATGCAAGCTCTTCCACC | | | |
| | TCG | | | |
| STOP | TGA | 1876 | stop | |

Appendix 24: pBP1385-pSFG-FRB.FKBP.ΔC9.T2A-ΔCD19

| | | SEQ | | SEQ |
|---|---|---|---|---|
| Fragment | Nucleotide | ID NO: | Peptide | ID NO: |
| FRB | gaaatgTGGCATGAAGGGTTGGAAG | 1877 | EMWHEGLEEASRLYFGERNVKG | 1878 |
| | AAGCTTCAAGGCTGTACTTCGGAG | | MFEVLEPLHAMMERGPQTLKETS | |
| | AGAGGAACGTGAAGGGCATGTTTG | | FNQAYGRDLMEAQEWCRKYMK | |
| | AGGTTCTTGAACCTCTGCACGCCA | | SGNVKDLTQAVVDLYYHVFRRISK | |
| | TGATGGAACGGGGACCGCAGACA | | | |
| | CTGAAAGAAACCTCTTTTAATCAGG | | | |
| | CCTACGGCAGAGACCTGATGGAG | | | |
| | GCCCAAGAATGGTGTAGAAAGTAT | | | |
| | ATGAAATCCGGTAACGTGAAAGAC | | | |
| | CTGactCAGGCCTGGGACCTTTATT | | | |
| | ACCATGTGTTCAGGCGGATCAGTA | | | |
| | AG | | | |
| Linker | GGCGGGcaattg | 1879 | ggql | 1880 |
| FKBP″ | GGcGTGCAaGTGGAaACTATaAGCC | 1881 | GVQVETISPGDGRTFPKRGQTCV | 1882 |
| | CgGGAGAcGGCcGcACATTtCCCAA | | VHYTGMLEDGKKFDSSRDRNKP | |
| | gAGAGGcCAGACcTGCGTgGTGCAc | | FKFMLGKQEVIRGWEEGVAQMS | |
| | TATACaGGAATGCTGGAgGACGGg | | VGQRAKLTISPDYAYGATGHPGII | |
| | AAGAAaTTCGAtAGCtcCCGGGAtCG | | PPHATLVFDVELLKLE | |
| | AAAtAAGCCtTTCAAaTTCATGCTGG | | | |
| | GcAAGCAaGAAGTcATCaGaGGCTG | | | |
| | GGAaGAAGGcGTCGCcCAGATGTC | | | |
| | cGTGGGtCAGcGcGCCAAgCTGACa | | | |
| | ATTAGtCCAGAtTACGCcTATGGcGC | | | |
| | AACaGGCCAtCCCGGcATCATcCCC | | | |
| | CCaCATGCcACACTcGTCTTtGATGT | | | |
| | cGAGCTcCTGAAaCTGGAg | | | |
| Linker | TCAGGCGGTGGCTCAGGTccatgg | 1883 | SGGGSGPW | 1884 |
| Δcaspase9 | GGATTTGGTGATGTCGGTGCTCTT | 1885 | GFGDVGALESLRGNADLAYILSM | 1886 |
| | GAGAGTTTGAGGGGAAATGCAGAT | | EPCGHCLIINNVNFCRESGLRTRT | |
| | TTGGCTTACATCCTGAGCATGGAG | | GSNIDCEKLRRRFSSLHFMVEVK | |
| | CCCTGTGGCCACTGCCTCATTATC | | GDLTAKKMVLALLELARQDHGAL | |
| | AACAATGTGAACTTCTGCCGTGAG | | DCCVVVILSHGCQASHLQFPGAV | |
| | TCCGGGCTCCGCACCCGCACTGG | | YGTDGCPVSVEKIVNIFNGTSCPS | |
| | CTCCAACATCGACTGTGAGAAGTT | | LGGKPKLFFIQACGGEQKDHGFE | |
| | GCGGCGTCGCTTCTCCTCGCTGCA | | VASTSPEDESPGSNPEPDATPFQ | |
| | TTTCATGGTGGAGGTGAAGGGCGA | | EGLRTFDQLDAISSLPTPSDIFVS | |
| | CCTGACTGCCAAGAAAATGGTGCT | | YSTFPGFVSVVRDPKSGSVVYVET | |
| | GGCTTTGCTGGAGCTGGCGCgGCA | | LDDIFEQWAHSEDLQSLLLRVAN | |
| | GGACCACGGTGCTCTGGACTGCT | | AVSVKGIYKQMPGCFNFLRKKLF | |
| | GCGTGGTGGTCATTCTCTCTCACG | | FKTSASRA | |
| | GCTGTCAGGCCAGCCACCTGCAGT | | | |
| | TCCCAGGGGCTGTCTACGGCACA | | | |
| | GATGGATGCCCTGTGTCGGTCGAG | | | |
| | AAGATTGTGAACATCTTCAATGGG | | | |
| | ACCAGCTGCCCCAGCCTGGGAGG | | | |
| | GAAGCCCAAGCTCTTTTTCATCCA | | | |
| | GGCCTGTGGTGGGGAGCAGAAAG | | | |
| | AtCATGGGTTTGAGGTGGCCTCCA | | | |
| | CTTCCCCTGAAGACGAGTCCCCTG | | | |
| | GCAGTAACCCCGAGCCAGATGCCA | | | |
| | CCCCGTTCCAGGAAGGTTTGAGGA | | | |
| | CCTTCGACCAGCTGGACGCCATAT | | | |
| | CTAGTTTGCCCACACCCAGTGACA | | | |
| | TCTTTGTGTCCTACTCTACTTTCCC | | | |
| | AGGTTTTGTTTCCTGGAGGGACCC | | | |
| | CAAGAGTGGCTCCTGGTACGTTGA | | | |
| | GACCCTGGACGACATCTTTGAGCA | | | |
| | GTGGGCTCACTCTGAAGACCTGCA | | | |
| | GTCCCTCCTGCTTAGGGTCGCTAA | | | |
| | TGCTGTTTCGGTGAAAGGGATTTA | | | |
| | TAAACAGATGCCTGGTTGCTTTAAT | | | |
| | TTCCTCCGGAAAAAACTTTTCTTTA | | | |
| | AAACATCAGCTAGCAGAGCC | | | |
| Linker | ggatctggaccgcGG | 1887 | GSGPR | 1888 |
| T2A | GAAGGCCGAGGGAGCCTGCTGAC | 1889 | EGRGSLLTCGDVEENPGP | 1890 |
| | ATGTGGCGATGTGGAGGAAAACCC | | | |
| | AGGACCA | | | |
| ΔCD19 | ATGCCACCACCTCGCCTGCTGTTC | 1891 | MPPPRLLFFLLFLTPMEVRPEEPL | 1892 |
| | TTTCTGCTGTTCCTGACACCTATGG | | VVKVEEGDNAVLQCLKGTSDGPT | |
| | AGGTGCGACCTGAGGAACCACTG | | QQLTWSRESPLKPFLKLSLGLPG | |
| | GTCGTGAAGGTCGAGGAAGGCGA | | LGIHMRPLAIVVLFIFNVSQQMGGF | |
| | CAATGCCGTGCTGCAGTGCCTGAA | | YLCQPGPPSEKAWQPGVVTVNVE | |
| | AGGCACTTCTGATGGGCCAACTCA | | GSGELFRWNVSDLGGLGCGLKN | |
| | GCAGCTGACCTGGTCCAGGGAGT | | RSSEGPSSPSGKLMSPKLYVWA | |
| | CTCCCCTGAAGCCTTTTCTGAAACT | | KDRPEIVVEGEPPCLPPRDSLNQS | |
| | GAGCCTGGGACTGCCAGGACTGG | | LSQDLTMAPGSTLVVLSCGVPPD | |
| | GAATCCACATGCGCCCTCTGGCTA | | SVSRGPLSVVTHVHPKGPKSLLSL | |
| | TCTGGCTGTTCATCTTCAACGTGA | | ELKDDRPARDMVVVMETGLLLPR | |
| | GCCAGCAGATGGGAGGATTCTACC | | ATAQDAGKYYCHRGNLTMSFHL | |
| | TGTGCCAGCCAGGACCACCATCCG | | EITARPVLVVHVVLLRTGGVVKVSA | |
| | AGAAGGCCTGGCAGCCTGGATGG | | VTLAYLIFCLCSLVGILHLQRALVL | |
| | ACCGTCAACGTGGAGGGGTCTGG | | RRKRKRMTDPTRRF | |
| | AGAACTGTTTAGGTGGAATGTGAG | | | |
| | TGACCTGGGAGGACTGGGATGTG | | | |
| | GGCTGAAGAACCGCTCCTCTGAAG | | | |
| | GCCCAAGTTCACCCTCAGGGAAGC | | | |
| | TGATGAGCCCAAAACTGTACGTGT | | | |
| | GGGCCAAAGATCGGCCCGAGATC | | | |
| | TGGGAGGGAGAACCTCCATGCCT | | | |
| | GCCACCTAGAGACAGCCTGAATCA | | | |
| | GAGTCTGTCACAGGATCTGACAAT | | | |
| | GGCCCCCGGGTCCACTCTGTGGC | | | |
| | TGTCTTGTGGAGTCCCACCCGACA | | | |
| | GCGTGTCCAGAGGCCCTCTGTCCT | | | |
| | GGACCCACGTGCATCCTAAGGGG | | | |
| | CCAAAAAGTCTGCTGTCACTGGAA | | | |
| | CTGAAGGACGATCGGCCTGCCAG | | | |
| | AGACATGTGGGTCATGGAGACTGG | | | |
| | ACTGCTGCTGCCACGAGCAACCGC | | | |
| | ACAGGATGCTGGAAAATACTATTG | | | |
| | CCACCGGGGCAATCTGACAATGTC | | | |
| | CTTCCATCTGGAGATCACTGCAAG | | | |
| | GCCCGTGCTGTGGCACTGGCTGC | | | |
| | TGCGAACCGGAGGATGGAAGGTC | | | |
| | AGTGCTGTGACACTGGCATATCTG | | | |
| | ATCTTTTGCCTGTGCTCCCTGGTG | | | |
| | GGCATTCTGCATCTGCAGAGAGCC | | | |
| | CTGGTGCTGCGGAGAAAGAGAAA | | | |
| | GAGAATGACTGACCCAACAAGAAG | | | |
| | GTTT | | | |
| STOP | TGA | 1893 | stop | |

Appendix 25: pBP1455-pSFG-MC.FKBP_{wt}.FRB_{L}.T2A-αPSCA.Q.CD8stm.ζ

| | | SEQ | | SEQ |
|---|---|---|---|---|
| Fragment | Nucleotide | ID NO: | Peptide | ID NO: |
| MyD88 | atggctgcaggaggtcccggcgcggggtctgcgg | 1894 | MAAGGPGAGSAAPVSSTSSLPLA | 1895 |
| | ccccggtctcctccacatcctcccttcccctggctgc | | ALNMRVRRRLSLFLNVRTQVAAD | |
| | tctcaacatgcgagtgcggcgccgcctgtctctgtt | | WTALAEEMDFEYLEIRQLETQAD | |
| | cttgaacgtgcggacacaggtggcggccgactgg | | PTGRLLDAWQGRPGASVGRLLD | |
| | accgcgctggcggaggagatggactttgagtactt | | LLTKLGRDDVLLELGPSIEEDCQK | |
| | ggagatccggcaactggagacacaagcggacc | | YILKQQQEEAEKPLQVAAVDSSV | |
| | ccactggcaggctgctggacgcctggcagggac | | PRTAELAGITTLDDPLGHMPERF | |
| | gccctggcgcctctgtaggccgactgctcgatctgc | | DAFICYCPSDI | |
| | ttaccaagctgggccgcgacgacgtgctgctgga | | | |
| | gctgggacccagcattgaggaggattgccaaaa | | | |
| | gtatatcttgaagcagcagcaggaggaggctgag | | | |
| | aagcctttacaggtggccgctgtagacagcagtgt | | | |
| | cccacggacagcagagctggcgggcatcacca | | | |
| | cacttgatgaccccctggggcatatgcctgagcgtt | | | |
| | tcgatgccttcatctgctattgccccagcgacatc | | | |
| Linker | gtcgag | 1896 | VE | 1897 |
| CD40 | aaaaaggtggccaagaagccaaccaataaggc | 1898 | KKVAKKPTNKAPHPKQEPQEINF | 1899 |
| | cccccaccccaagcaggagccccaggagatca | | PDDLPGSNTAAPVQETLHGCQP | |
| | attttcccgacgatcttcctggctccaacactgctgct | | VTQEDGKESRISVQERQ | |
| | ccagtgcaggagactttacatggatgccaaccggt | | | |
| | cacccaggaggatggcaaagagagtcgcatctc | | | |
| | agtgcaggagagacag | | | |
| Linker | gtcgag | 1900 | VE | 1901 |
| FKBP_{WT}′ | GGCGTCCAAGTCGAAACCATTAGT | 1902 | GVQVETISPGDGRTFPKRGQTCV | 1903 |
| | CCCGGCGATGGCAGAACATTTCCT | | VHYTGMLEDGKKFDSSRDRNKP | |
| | ACAAGGGGACAAACATGTGTCGTC | | FKFMLGKQEVIRGWEEGVAQMS | |
| | CATTATACAGGCATGTTGGAGGAC | | VGQRAKLTISPDYAYGATGHPGII | |
| | GGCAAAAAGTTCGACAGTAGTAGA | | PPHATLVFDVELLKLE | |
| | GATCGCAATAAACCTTTCAAATTCA | | | |
| | TGTTGGGAAAACAAGAAGTCATTA | | | |
| | GGGGATGGGAGGAGGGCGTGGCT | | | |
| | CAAATGTCCGTCGGCCAACGCGCT | | | |
| | AAGCTCACCATCAGCCCCGACTAC | | | |
| | GCATACGGCGCTACCGGACATCCC | | | |
| | GGAATTATTCCCCCTCACGCTACC | | | |
| | TTGGTGTTTGACGTCGAACTGTTG | | | |
| | AAGCTCGAA | | | |
| Linker | gtcgag | 1904 | VE | 1905 |
| FRB_{L} | CAATTGGAAATGTGGCATGAAGGG | 1906 | QLEMWHEGLEEASRLYFGERNV | 1907 |
| | TTGGAAGAAGCTTCAAGGCTGTAC | | KGMFEVLEPLHAMMERGPQTLK | |
| | TTCGGAGAGAGGAACGTGAAGGG | | ETSFNQAYGRDLMEAQEWCRKY | |
| | CATGTTTGAGGTTCTTGAACCTCTG | | MKSGNVKDLLQAVVDLYYHVFRRI | |
| | CACGCCATGATGGAACGGGGACC | | SK | |
| | GCAGACACTGAAAGAAACCTCTTT | | | |
| | TAATCAGGCCTACGGCAGAGACCT | | | |
| | GATGGAGGCCCAAGAATGGTGTAG | | | |
| | AAAGTATATGAAATCCGGTAACGT | | | |
| | GAAAGACCTGCTCCAGGCCTGGG | | | |
| | ACCTTTATTACCATGTGTTCAGGCG | | | |
| | GATCAGTAAG | | | |
| Linker | GGCTCAGGT | 1908 | GSG | 1909 |
| T2A | GAAGGCCGAGGGAGCCTGCTGAC | 1910 | EGRGSLLTCGDVEENPGP | 1911 |
| | ATGTGGCGATGTGGAGGAAAACCC | | | |
| | AGGACCA | | | |
| Linker | CCATGG | 1912 | PW | 1913 |
| Signal | ATGGAGTTTGGACTTTCTTGGTTGT | 1914 | MEFGLSVVLFLVAILKGVQCSR | 1915 |
| Peptide | TTTTGGTGGCAATTCTGAAGGGTG | | | |
| | TCCAGTGTAGCAGG | | | |
| PSCA(A11) | GACATCCAACTGACGCAAAGCCCA | 1916 | DIQLTQSPSTLSASMGDRVTITCS | 1917 |
| VL | TCTACACTCAGCGCTAGCATGGGG | | ASSSVRFIHVVYQQKPGKAPKRLI | |
| | GACAGGGTCACAATCACGTGCTCT | | YDTSKLASGVPSRFSGSGSGTDF | |
| | GCCTCAAGTTCCGTTAGGTTTATC | | TLTISSLQPEDFATYYCQQWGSS | |
| | CATTGGTATCAGCAGAAACCTGGA | | PFTFGQGTKVEIK | |
| | AAGGCCCCAAAAAGACTGATCTAT | | | |
| | GATACCAGCAAGCTGGCTTCCGGA | | | |
| | GTGCCCTCAAGGTTCTCAGGATCT | | | |
| | GGCAGTGGGACCGATTTCACCCTG | | | |
| | ACAATTAGCAGCCTTCAGCCAGAG | | | |
| | GATTTCGCAACCTATTACTGTCAGC | | | |
| | AATGGGGGTCCAGCCCATTCACTT | | | |
| | TCGGCCAAGGAACAAAGGTGGAG | | | |
| | ATAAAA | | | |
| Flex | GGCGGAGGAAGCGGAGGTGGGG | 1918 | gggsgggg | 1919 |
| | GC | | | |
| PSCA(A11) | GAGGTGCAGCTCGTGGAGTATGG | 1920 | EVQLVEYGGGLVQPGGSLRLSC | 1921 |
| VH | CGGGGGCCTGGTGCAGCCTGGGG | | AASGFNIKDYYIHVVVRQAPGKGL | |
| | GTAGTCTGAGGCTCTCCTGCGCTG | | EVVVAWIDPENGDTEFVPKFQGR | |
| | CCTCTGGCTTTAACATTAAAGACTA | | ATMSADTSKNTAYLQMNSLRAED | |
| | CTACATACATTGGGTGCGGCAGGC | | TAVYYCKTGGFWGQGTLVTVSS | |
| | CCCAGGCAAAGGGCTCGAATGGG | | | |
| | TGGCCTGGATTGACCCTGAGAATG | | | |
| | GTGACACTGAGTTTGTCCCCAAGT | | | |
| | TTCAGGGCAGAGCCACCATGAGC | | | |
| | GCTGACACAAGCAAAAACACTGCT | | | |
| | TATCTCCAAATGAATAGCCTGCGA | | | |
| | GCTGAAGATACAGCAGTCTATTAC | | | |
| | TGCAAGACGGGAGGATTCTGGGG | | | |
| | CCAGGGAACTCTGGTGACAGTTAG | | | |
| | TTCC | | | |
| Linker | GGATCC | 1922 | gs | 1923 |
| CD34 | GAACTTCCTACTCAGGGGACTTTC | 1924 | ELPTQGTFSNVSTNVS | 1925 |
| epitope | TCAAACGTTAGCACAAACGTAAGT | | | |
| CD8 stalk | CCCGCCCCAAGACCCCCCACACCT | 1926 | PAPRPPTPAPTIASQPLSLRPEAC | 1927 |
| | GCGCCGACCATTGCTTCTCAACCC | | RPAAGGAVHTRGLDFACD | |
| | CTGAGTTTGAGACCCGAGGCCTGC | | | |
| | CGGCCAGCTGCCGGCGGGGCCGT | | | |
| | GCATACAAGAGGACTCGATTTCGC | | | |
| | TTGCGAC | | | |
| CD8 | ATCTATATCTGGGCACCTCTCGCT | 1928 | IYIWAPLAGTCGVLLLSLVITLYCN | 1929 |
| trans- | GGCACCTGTGGAGTCCTTCTGCTC | | HRNRRRVCKCPR | |
| membrane | AGCCTGGTTATTACTCTGTACTGTA | | | |
| | ATCACCGGAATCGCCGCCGCGTTT | | | |
| | GTAAGTGTCCCAGG | | | |
| Linker | GTCGAC | 1930 | VD | 1931 |
| CD3ζ | AGAGTGAAGTTCAGCAGGAGCGCA | 1932 | RVKFSRSADAPAYQQGQNQLYN | 1933 |
| | GACGCCCCCGCGTACCAGCAGGG | | ELNLGRREEYDVLDKRRGRDPE | |
| | CCAGAACCAGCTCTATAACGAGCT | | MGGKPRRKNPQEGLYNELQKDK | |
| | CAATCTAGGACGAAGAGAGGAGTA | | MAEAYSEIGMKGERRRGKGHDG | |
| | CGATGTTTTGGACAAGAGACGTGG | | LYQGLSTATKDTYDALHMQALPP | |
| | CCGGGACCCTGAGATGGGGGGAA | | R | |
| | AGCCGAGAAGGAAGAACCCTCAG | | | |
| | GAAGGCCTGTACAATGAACTGCAG | | | |
| | AAAGATAAGATGGCGGAGGCCTAC | | | |
| | AGTGAGATTGGGATGAAAGGCGAG | | | |
| | CGCCGGAGGGGCAAGGGGCACGA | | | |
| | TGGCCTTTACCAGGGTCTCAGTAC | | | |
| | AGCCACCAAGGACACCTACGACGC | | | |
| | CCTTCACATGCAAGCTCTTCCACC | | | |
| | TCGT | | | |

Appendix 26: pBP1466-pSFG-FKBPᵥ.ΔC9.T2A-PSCA.Q.CD8stm.ζ.P2A-MC.FKBP_{wt}.FRB_{L}

| | | SEQ | | SEQ |
|---|---|---|---|---|
| Fragment | Nucleotide | ID NO: | Peptide | ID NO: |
| Leader | ATGCtcgagcaattgGAG | 1934 | MLEQLE | 1935 |
| peptide | | | | |
| FKBPv | GGAGTGCAGGTGGAGACTATTAGC | 1936 | GVQVETISPGDGRTFPKRGQTCV | 1937 |
| | CCCGGAGATGGCAGAACATTCCCC | | VHYTGMLEDGKKVDSSRDRNKP | |
| | AAAAGAGGACAGACTTGCGTCGTG | | FKFMLGKQEVIRGWEEGVAQMS | |
| | CATTATACTGGAATGCTGGAAGAC | | VGQRAKLTISPDYAYGATGHPGII | |
| | GGCAAGAAGGTGGACAGCAGCCG | | PPHATLVFDVELLKLE | |
| | GGACCGAAACAAGCCCTTCAAGTT | | | |
| | CATGCTGGGGAAGCAGGAAGTGAT | | | |
| | CCGGGGCTGGGAGGAAGGAGTCG | | | |
| | CACAGATGTCAGTGGGACAGAGG | | | |
| | GCCAAACTGACTATTAGCCCAGAC | | | |
| | TACGCTTATGGAGCAACCGGCCAC | | | |
| | CCCGGGATCATTCCCCCTCATGCT | | | |
| | ACACTGGTCTTCGATGTGGAGCTG | | | |
| | CTGAAGCTGGAA | | | |
| Linker | TCAGGCGGTGGCTCAGGTGTGGA | 1938 | SGGGSGVD | 1939 |
| | C | | | |
| Δcaspase9 | GGATTTGGTGATGTCGGTGCTCTT | 1940 | GFGDVGALESLRGNADLAYILSM | 1941 |
| | GAGAGTTTGAGGGGAAATGCAGAT | | EPCGHCLIINNVNFCRESGLRTRT | |
| | TTGGCTTACATCCTGAGCATGGAG | | GSNIDCEKLRRRFSSLHFMVEVK | |
| | CCCTGTGGCCACTGCCTCATTATC | | GDLTAKKMVLALLELARQDHGAL | |
| | AACAATGTGAACTTCTGCCGTGAG | | DCCVVVILSHGCQASHLQFPGAV | |
| | TCCGGGCTCCGCACCCGCACTGG | | YGTDGCPVSVEKIVNIFNGTSCPS | |
| | CTCCAACATCGACTGTGAGAAGTT | | LGGKPKLFFIQACGGEQKDHGFE | |
| | GCGGCGTCGCTTCTCCTCGCTGCA | | VASTSPEDESPGSNPEPDATPFQ | |
| | TTTCATGGTGGAGGTGAAGGGCGA | | EGLRTFDQLDAISSLPTPSDIFVS | |
| | CCTGACTGCCAAGAAAATGGTGCT | | YSTFPGFVSVVRDPKSGSVVYVET | |
| | GGCTTTGCTGGAGCTGGCGCgGCA | | LDDIFEQWAHSEDLQSLLLRVAN | |
| | GGACCACGGTGCTCTGGACTGCT | | AVSVKGIYKQMPGCFNFLRKKLF | |
| | GCGTGGTGGTCATTCTCTCTCACG | | FKTSASRA | |
| | GCTGTCAGGCCAGCCACCTGCAGT | | | |
| | TCCCAGGGGCTGTCTACGGCACA | | | |
| | GATGGATGCCCTGTGTCGGTCGAG | | | |
| | AAGATTGTGAACATCTTCAATGGG | | | |
| | ACCAGCTGCCCCAGCCTGGGAGG | | | |
| | GAAGCCCAAGCTCTTTTTCATCCA | | | |
| | GGCCTGTGGTGGGGAGCAGAAAG | | | |
| | AtCATGGGTTTGAGGTGGCCTCCA | | | |
| | CTTCCCCTGAAGACGAGTCCCCTG | | | |
| | GCAGTAACCCCGAGCCAGATGCCA | | | |
| | CCCCGTTCCAGGAAGGTTTGAGGA | | | |
| | CCTTCGACCAGCTGGACGCCATAT | | | |
| | CTAGTTTGCCCACACCCAGTGACA | | | |
| | TCTTTGTGTCCTACTCTACTTTCCC | | | |
| | AGGTTTTGTTTCCTGGAGGGACCC | | | |
| | CAAGAGTGGCTCCTGGTACGTTGA | | | |
| | GACCCTGGACGACATCTTTGAGCA | | | |
| | GTGGGCTCACTCTGAAGACCTGCA | | | |
| | GTCCCTCCTGCTTAGGGTCGCTAA | | | |
| | TGCTGTTTCGGTGAAAGGGATTTA | | | |
| | TAAACAGATGCCTGGTTGCTTTAAT | | | |
| | TTCCTCCGGAAAAAACTTTTCTTTA | | | |
| | AAACATCAGCTAGCAGAGCC | | | |
| Linker | ggatctggaccgcGG | 1942 | GSGPR | 1943 |
| T2A | GAAGGCCGAGGGAGCCTGCTGAC | 1944 | EGRGSLLTCGDVEENPGP | 1945 |
| | ATGTGGCGATGTGGAGGAAAACCC | | | |
| | AGGACCA | | | |
| Linker | CCACGG | 1946 | PR | 1947 |
| Signal | ATGGAGTTTGGACTTTCTTGGTTGT | 1948 | MEFGLSVVLFLVAILKGVQCSR | 1949 |
| Peptide | TTTTGGTGGCAATTCTGAAGGGTG | | | |
| | TCCAGTGTAGCAGG | | | |
| PSCA(A11) | GACATCCAACTGACGCAAAGCCCA | 1950 | DIQLTQSPSTLSASMGDRVTITCS | 1951 |
| VL | TCTACACTCAGCGCTAGCATGGGG | | ASSSVRFIHVVYQQKPGKAPKRLI | |
| | GACAGGGTCACAATCACGTGCTCT | | YDTSKLASGVPSRFSGSGSGTDF | |
| | GCCTCAAGTTCCGTTAGGTTTATC | | TLTISSLQPEDFATYYCQQWGSS | |
| | CATTGGTATCAGCAGAAACCTGGA | | PFTFGQGTKVEIK | |
| | AAGGCCCCAAAAAGACTGATCTAT | | | |
| | GATACCAGCAAGCTGGCTTCCGGA | | | |
| | GTGCCCTCAAGGTTCTCAGGATCT | | | |
| | GGCAGTGGGACCGATTTCACCCTG | | | |
| | ACAATTAGCAGCCTTCAGCCAGAG | | | |
| | GATTTCGCAACCTATTACTGTCAGC | | | |
| | AATGGGGGTCCAGCCCATTCACTT | | | |
| | TCGGCCAAGGAACAAAGGTGGAG | | | |
| | ATAAAA | | | |
| Flex | GGCGGAGGAAGCGGAGGTGGGG | 1952 | gggsgggg | 1953 |
| | GC | | | |
| PSCA(A11) | GAGGTGCAGCTCGTGGAGTATGG | 1954 | EVQLVEYGGGLVQPGGSLRLSC | 1955 |
| VH | CGGGGGCCTGGTGCAGCCTGGGG | | AASGFNIKDYYIHVVVRQAPGKGL | |
| | GTAGTCTGAGGCTCTCCTGCGCTG | | EVVVAWIDPENGDTEFVPKFQGR | |
| | CCTCTGGCTTTAACATTAAAGACTA | | ATMSADTSKNTAYLQMNSLRAED | |
| | CTACATACATTGGGTGCGGCAGGC | | TAVYYCKTGGFWGQGTLVTVSS | |
| | CCCAGGCAAAGGGCTCGAATGGG | | | |
| | TGGCCTGGATTGACCCTGAGAATG | | | |
| | GTGACACTGAGTTTGTCCCCAAGT | | | |
| | TTCAGGGCAGAGCCACCATGAGC | | | |
| | GCTGACACAAGCAAAAACACTGCT | | | |
| | TATCTCCAAATGAATAGCCTGCGA | | | |
| | GCTGAAGATACAGCAGTCTATTAC | | | |
| | TGCAAGACGGGAGGATTCTGGGG | | | |
| | CCAGGGAACTCTGGTGACAGTTAG | | | |
| | TTCC | | | |
| Linker | GGATCC | 1956 | gs | 1957 |
| CD34 | GAACTTCCTACTCAGGGGACTTTC | 1958 | ELPTQGTFSNVSTNVS | 1959 |
| epitope | TCAAACGTTAGCACAAACGTAAGT | | | |
| CD3ζ | AGAGTGAAGTTCAGCAGGAGCGCA | 1960 | RVKFSRSADAPAYQQGQNQLYN | 1961 |
| | GACGCCCCCGCGTACCAGCAGGG | | ELNLGRREEYDVLDKRRGRDPE | |
| | CCAGAACCAGCTCTATAACGAGCT | | MGGKPRRKNPQEGLYNELQKDK | |
| | CAATCTAGGACGAAGAGAGGAGTA | | MAEAYSEIGMKGERRRGKGHDG | |
| | CGATGTTTTGGACAAGAGACGTGG | | LYQGLSTATKDTYDALHMQALPP | |
| | CCGGGACCCTGAGATGGGGGGAA | | R | |
| | AGCCGAGAAGGAAGAACCCTCAG | | | |
| | GAAGGCCTGTACAATGAACTGCAG | | | |
| | AAAGATAAGATGGCGGAGGCCTAC | | | |
| | AGTGAGATTGGGATGAAAGGCGAG | | | |
| | CGCCGGAGGGGCAAGGGGCACGA | | | |
| | TGGCCTTTACCAGGGTCTCAGTAC | | | |
| | AGCCACCAAGGACACCTACGACGC | | | |
| | CCTTCACATGCAAGCTCTTCCACC | | | |
| | TCGT | | | |
| Linker | ggttccgga | 1962 | GSG | 1963 |
| T2A | GAAGGCCGAGGGAGCCTGCTGAC | 1964 | EGRGSLLTCGDVEENPGP | 1965 |
| | ATGTGGCGATGTGGAGGAAAACCC | | | |
| | AGGACCA | | | |
| Linker | ggatctgga | 1966 | GSG | 1967 |
| P2A | GCAACGAATTTTTCCCTGCTGAAA | 1968 | ATNFSLLKQAGDVEENPGP | 1969 |
| | CAGGCAGGGGACGTAGAGGAAAA | | | |
| | TCCTGGTCCT | | | |
| MyD88 | atggctgcaggaggtcccggcgcggggtctgcgg | 1970 | MAAGGPGAGSAAPVSSTSSLPLA | 1971 |
| | ccccggtctcctccacatcctcccttcccctggctgc | | ALNMRVRRRLSLFLNVRTQVAAD | |
| | tctcaacatgcgagtgcggcgccgcctgtctctgtt | | WTALAEEMDFEYLEIRQLETQAD | |
| | cttgaacgtgcggacacaggtggcggccgactgg | | PTGRLLDAWQGRPGASVGRLLD | |
| | accgcgctggcggaggagatggactttgagtactt | | LLTKLGRDDVLLELGPSIEEDCQK | |
| | ggagatccggcaactggagacacaagcggacc | | YILKQQQEEAEKPLQVAAVDSSV | |
| | ccactggcaggctgctggacgcctggcagggac | | PRTAELAGITTLDDPLGHMPERF | |
| | gccctggcgcctctgtaggccgactgctcgatctgc | | DAFICYCPSDI | |
| | ttaccaagctgggccgcgacgacgtgctgctgga | | | |
| | gctgggacccagcattgaggaggattgccaaaa | | | |
| | gtatatcttgaagcagcagcaggaggaggctgag | | | |
| | aagcctttacaggtggccgctgtagacagcagtgt | | | |
| | cccacggacagcagagctggcgggcatcacca | | | |
| | cacttgatgaccccctggggcatatgcctgagcgtt | | | |
| | tcgatgccttcatctgctattgccccagcgacatc | | | |
| Linker | gtcgag | 1972 | VE | 1973 |
| CD40 | aaaaaggtggccaagaagccaaccaataaggc | 1974 | KKVAKKPTNKAPHPKQEPQEINF | 1975 |
| | cccccaccccaagcaggagccccaggagatca | | PDDLPGSNTAAPVQETLHGCQP | |
| | attttcccgacgatcttcctggctccaacactgctgct | | VTQEDGKESRISVQERQ | |
| | ccagtgcaggagactttacatggatgccaaccggt | | | |
| | cacccaggaggatggcaaagagagtcgcatctc | | | |
| | agtgcaggagagacag | | | |
| Linker | gtcgag | 1976 | VE | 1977 |
| FKBP_{WT}_{^{′}} | GGCGTCCAAGTCGAAACCATTAGT | 1978 | GVQVETISPGDGRTFPKRGQTCV | 1979 |
| | CCCGGCGATGGCAGAACATTTCCT | | VHYTGMLEDGKKFDSSRDRNKP | |
| | ACAAGGGGACAAACATGTGTCGTC | | FKFMLGKQEVIRGWEEGVAQMS | |
| | CATTATACAGGCATGTTGGAGGAC | | VGQRAKLTISPDYAYGATGHPGII | |
| | GGCAAAAAGTTCGACAGTAGTAGA | | PPHATLVFDVELLKLE | |
| | GATCGCAATAAACCTTTCAAATTCA | | | |
| | TGTTGGGAAAACAAGAAGTCATTA | | | |
| | GGGGATGGGAGGAGGGCGTGGCT | | | |
| | CAAATGTCCGTCGGCCAACGCGCT | | | |
| | AAGCTCACCATCAGCCCCGACTAC | | | |
| | GCATACGGCGCTACCGGACATCCC | | | |
| | GGAATTATTCCCCCTCACGCTACC | | | |
| | TTGGTGTTTGACGTCGAACTGTTG | | | |
| | AAGCTCGAA | | | |
| Linker | gtcgag | 1980 | VE | 1981 |
| FRB_{L} | CAATTGGAAATGTGGCATGAAGGG | 1982 | QLEMWHEGLEEASRLYFGERNV | 1983 |
| | TTGGAAGAAGCTTCAAGGCTGTAC | | KGMFEVLEPLHAMMERGPQTLK | |
| | TTCGGAGAGAGGAACGTGAAGGG | | ETSFNQAYGRDLMEAQEWCRKY | |
| | CATGTTTGAGGTTCTTGAACCTCTG | | MKSGNVKDLLQAVVDLYYHVFRRI | |
| | CACGCCATGATGGAACGGGGACC | | SK | |
| | GCAGACACTGAAAGAAACCTCTTT | | | |
| | TAATCAGGCCTACGGCAGAGACCT | | | |
| | GATGGAGGCCCAAGAATGGTGTAG | | | |
| | AAAGTATATGAAATCCGGTAACGT | | | |
| | GAAAGACCTGCTCCAGGCCTGGG | | | |
| | ACCTTTATTACCATGTGTTCAGGCG | | | |
| | GATCAGTAAG | | | |
| STOPtail | TCAGGCGGTGGCTCAGGTCCGCG | 1984 | SGGGSGPR-stop | 1985 |
| | GTGA | | | |

Appendix 27: pBP1474-pSFG-FKBPv.ΔC9.T2A-αHER2.Q.CD8stm.ζ

| | | SEQ | | SEQ ID |
|---|---|---|---|---|
| Fragment | Nucleotide | ID NO: | Peptide | NO: |
| Leader | ATGCtcgagcaattgGAG | 1986 | MLEQLE | 1987 |
| peptide | | | | |
| FKBPv | GGAGTGCAGGTGGAGACTATTAGC | 1988 | GVQVETISPGDGRTFPKRGQTCV | 1989 |
| | CCCGGAGATGGCAGAACATTCCCC | | VHYTGMLEDGKKVDSSRDRNKP | |
| | AAAAGAGGACAGACTTGCGTCGTG | | FKFMLGKQEVIRGVVEEGVAQMS | |
| | CATTATACTGGAATGCTGGAAGAC | | VGQRAKLTISPDYAYGATGHPGII | |
| | GGCAAGAAGGTGGACAGCAGCCG | | PPHATLVFDVELLKLE | |
| | GGACCGAAACAAGCCCTTCAAGTT | | | |
| | CATGCTGGGGAAGCAGGAAGTGAT | | | |
| | CCGGGGCTGGGAGGAAGGAGTCG | | | |
| | CACAGATGTCAGTGGGACAGAGG | | | |
| | GCCAAACTGACTATTAGCCCAGAC | | | |
| | TACGCTTATGGAGCAACCGGCCAC | | | |
| | CCCGGGATCATTCCCCCTCATGCT | | | |
| | ACACTGGTCTTCGATGTGGAGCTG | | | |
| | CTGAAGCTGGAA | | | |
| Linker | TCAGGCGGTGGCTCAGGTGTGGA | 1990 | SGGGSGVD | 1991 |
| | C | | | |
| Δcaspase9 | GGATTTGGTGATGTCGGTGCTCTT | 1992 | GFGDVGALESLRGNADLAYILSM | 1993 |
| | GAGAGTTTGAGGGGAAATGCAGAT | | EPCGHCLIINNVNFCRESGLRTRT | |
| | TTGGCTTACATCCTGAGCATGGAG | | GSNIDCEKLRRRFSSLHFMVEVK | |
| | CCCTGTGGCCACTGCCTCATTATC | | GDLTAKKMVLALLELARQDHGAL | |
| | AACAATGTGAACTTCTGCCGTGAG | | DCCVVVILSHGCQASHLQFPGAV | |
| | TCCGGGCTCCGCACCCGCACTGG | | YGTDGCPVSVEKIVNIFNGTSCPS | |
| | CTCCAACATCGACTGTGAGAAGTT | | LGGKPKLFFIQACGGEQKDHGFE | |
| | GCGGCGTCGCTTCTCCTCGCTGCA | | VASTSPEDESPGSNPEPDATPFQ | |
| | TTTCATGGTGGAGGTGAAGGGCGA | | EGLRTFDQLDAISSLPTPSDIFVS | |
| | CCTGACTGCCAAGAAAATGGTGCT | | YSTFPGFVSVVRDPKSGSVVYVET | |
| | GGCTTTGCTGGAGCTGGCGCgGCA | | LDDIFEQWAHSEDLQSLLLRVAN | |
| | GGACCACGGTGCTCTGGACTGCT | | AVSVKGIYKQMPGCFNFLRKKLF | |
| | GCGTGGTGGTCATTCTCTCTCACG | | FKTSASRA | |
| | GCTGTCAGGCCAGCCACCTGCAGT | | | |
| | TCCCAGGGGCTGTCTACGGCACA | | | |
| | GATGGATGCCCTGTGTCGGTCGAG | | | |
| | AAGATTGTGAACATCTTCAATGGG | | | |
| | ACCAGCTGCCCCAGCCTGGGAGG | | | |
| | GAAGCCCAAGCTCTTTTTCATCCA | | | |
| | GGCCTGTGGTGGGGAGCAGAAAG | | | |
| | AtCATGGGTTTGAGGTGGCCTCCA | | | |
| | CTTCCCCTGAAGACGAGTCCCCTG | | | |
| | GCAGTAACCCCGAGCCAGATGCCA | | | |
| | CCCCGTTCCAGGAAGGTTTGAGGA | | | |
| | CCTTCGACCAGCTGGACGCCATAT | | | |
| | CTAGTTTGCCCACACCCAGTGACA | | | |
| | TCTTTGTGTCCTACTCTACTTTCCC | | | |
| | AGGTTTTGTTTCCTGGAGGGACCC | | | |
| | CAAGAGTGGCTCCTGGTACGTTGA | | | |
| | GACCCTGGACGACATCTTTGAGCA | | | |
| | GTGGGCTCACTCTGAAGACCTGCA | | | |
| | GTCCCTCCTGCTTAGGGTCGCTAA | | | |
| | TGCTGTTTCGGTGAAAGGGATTTA | | | |
| | TAAACAGATGCCTGGTTGCTTTAAT | | | |
| | TTCCTCCGGAAAAAACTTTTCTTTA | | | |
| | AAACATCAGCTAGCAGAGCC | | | |
| Linker | ggatctggaccgcGG | 1994 | GSGPR | 1995 |
| T2A | GAAGGCCGAGGGAGCCTGCTGAC | 1996 | EGRGSLLTCGDVEENPGP | 1997 |
| | ATGTGGCGATGTGGAGGAAAACCC | | | |
| | AGGACCA | | | |
| Linker | GCATGCGCCACC | 1998 | ACAT | 1999 |
| Signal | ATGGAGTTTGGGTTGTCATGGTTG | 2000 | MEFGLSWLFLVAILKGVQCSR | 2001 |
| Peptide | TTTCTCGTCGCTATTCTCAAAGGTG | | | |
| | TACAATGCTCCCGC | | | |
| HER2(FRP5) | GAAGTCCAATTGCAACAGTCAGGC | 2002 | EVQLQQSGPELKKPGETVKISCK | 2003 |
| VH | CCCGAATTGAAAAAGCCCGGCGAA | | ASGYPFTNYGMNVVVKQAPGQGL | |
| | ACAGTGAAGATATCTTGTAAAGCCT | | KWMGWINTSTGESTFADDFKGR | |
| | CCGGTTACCCTTTTACGAACTATG | | FDFSLETSANTAYLQINNLKSEDM | |
| | GAATGAACTGGGTCAAACAAGCCC | | ATYFCARWEVYHGYVPYWGQGT | |
| | CTGGACAGGGATTGAAGTGGATGG | | TVTVSS | |
| | GATGGATCAATACATCAACAGGCG | | | |
| | AGTCTACCTTCGCAGATGATTTCAA | | | |
| | AGGTCGCTTTGACTTCTCACTGGA | | | |
| | GACCAGTGCAAATACCGCCTACCT | | | |
| | TCAGATTAACAATCTTAAAAGCGAG | | | |
| | GATATGGCAACCTACTTTTGCGCA | | | |
| | AGATGGGAAGTTTATCACGGGTAC | | | |
| | GTGCCATACTGGGGACAAGGAAC | | | |
| | GACAGTGACAGTTAGTAGC | | | |
| Flex | GGCGGTGGAGGCTCCGGTGGAGG | 2004 | GGGGSGGGGSGGGGS | 2005 |
| | CGGCTCTGGAGGAGGAGGTTCA | | | |
| HER2(FRP5) | GACATCCAATTGACACAATCACAC | 2006 | EVQLVEYGGGLVQPGGSLRLSC | 2007 |
| VL | AAATTTCTCTCAACTTCTGTAGGAG | | AASGFNIKDYYIHVVVRQAPGKGL | |
| | ACAGAGTGAGCATAACCTGCAAAG | | EVVVAWIDPENGDTEFVPKFQGR | |
| | CATCCCAGGACGTGTACAATGCTG | | ATMSADTSKNTAYLQMNSLRAED | |
| | TGGCTTGGTACCAACAGAAGCCTG | | TAVYYCKTGGFWGQGTLVTVSS | |
| | GACAATCCCCAAAATTGCTGATTTA | | | |
| | TTCTGCCTCTAGTAGGTACACTGG | | | |
| | GGTACCTTCTCGGTTTACGGGCTC | | | |
| | TGGGTCCGGACCAGATTTCACGTT | | | |
| | CACAATCAGTTCCGTTCAAGCTGA | | | |
| | AGACCTCGCTGTTTATTTTTGCCAG | | | |
| | CAGCACTTCCGAACCCCTTTTACTT | | | |
| | TTGGCTCAGGCACTAAGTTGGAAA | | | |
| | TCAAGGCTTTG | | | |
| Linker | atgcat | 2008 | MH | 2009 |
| CD34 | GAACTTCCTACTCAGGGGACTTTC | 2010 | ELPTQGTFSNVSTNVS | 2011 |
| epitope | TCAAACGTTAGCACAAACGTAAGT | | | |
| CD3ζ | AGAGTGAAGTTCAGCAGGAGCGCA | 2012 | RVKFSRSADAPAYQQGQNQLYN | 2013 |
| | GACGCCCCCGCGTACCAGCAGGG | | ELNLGRREEYDVLDKRRGRDPE | |
| | CCAGAACCAGCTCTATAACGAGCT | | MGGKPRRKNPQEGLYNELQKDK | |
| | CAATCTAGGACGAAGAGAGGAGTA | | MAEAYSEIGMKGERRRGKGHDG | |
| | CGATGTTTTGGACAAGAGACGTGG | | LYQGLSTATKDTYDALHMQALPP | |
| | CCGGGACCCTGAGATGGGGGGAA | | R | |
| | AGCCGAGAAGGAAGAACCCTCAG | | | |
| | GAAGGCCTGTACAATGAACTGCAG | | | |
| | AAAGATAAGATGGCGGAGGCCTAC | | | |
| | AGTGAGATTGGGATGAAAGGCGAG | | | |
| | CGCCGGAGGGGCAAGGGGCACGA | | | |
| | TGGCCTTTACCAGGGTCTCAGTAC | | | |
| | AGCCACCAAGGACACCTACGACGC | | | |
| | CCTTCACATGCAAGCTCTTCCACC | | | |
| | TCGT | | | |

Appendix 28: pBP1475-pSFG-FKBPv.ΔC9.T2A-αPSCA.Q.CD8stm.ζ

| | | | | SEQ |
|---|---|---|---|---|
| | | SEQ | | ID |
| Fragment | Nucleotide | ID NO: | Peptide | NO: |
| Leader | ATGCtcgagcaattgGAG | 2014 | MLEQLE | 2015 |
| peptide | | | | |
| FKBPv | GGAGTGCAGGTGGAGACTATTAGC | 2016 | GVQVETISPGDGRTFPKRGQTCV | 2017 |
| | CCCGGAGATGGCAGAACATTCCCC | | VHYTGMLEDGKKVDSSRDRNKP | |
| | AAAAGAGGACAGACTTGCGTCGTG | | FKFMLGKQEVIRGVVEEGVAQMS | |
| | CATTATACTGGAATGCTGGAAGAC | | VGQRAKLTISPDYAYGATGHPGII | |
| | GGCAAGAAGGTGGACAGCAGCCG | | PPHATLVFDVELLKLE | |
| | GGACCGAAACAAGCCCTTCAAGTT | | | |
| | CATGCTGGGGAAGCAGGAAGTGAT | | | |
| | CCGGGGCTGGGAGGAAGGAGTCG | | | |
| | CACAGATGTCAGTGGGACAGAGG | | | |
| | GCCAAACTGACTATTAGCCCAGAC | | | |
| | TACGCTTATGGAGCAACCGGCCAC | | | |
| | CCCGGGATCATTCCCCCTCATGCT | | | |
| | ACACTGGTCTTCGATGTGGAGCTG | | | |
| | CTGAAGCTGGAA | | | |
| Linker | TCAGGCGGTGGCTCAGGTGTGGA | 2018 | SGGGSGVD | 2019 |
| | C | | | |
| Δcaspase9 | GGATTTGGTGATGTCGGTGCTCTT | 2020 | GFGDVGALESLRGNADLAYILSM | 2021 |
| | GAGAGTTTGAGGGGAAATGCAGAT | | EPCGHCLIINNVNFCRESGLRTRT | |
| | TTGGCTTACATCCTGAGCATGGAG | | GSNIDCEKLRRRFSSLHFMVEVK | |
| | CCCTGTGGCCACTGCCTCATTATC | | GDLTAKKMVLALLELARQDHGAL | |
| | AACAATGTGAACTTCTGCCGTGAG | | DCCVVVILSHGCQASHLQFPGAV | |
| | TCCGGGCTCCGCACCCGCACTGG | | YGTDGCPVSVEKIVNIFNGTSCPS | |
| | CTCCAACATCGACTGTGAGAAGTT | | LGGKPKLFFIQACGGEQKDHGFE | |
| | GCGGCGTCGCTTCTCCTCGCTGCA | | VASTSPEDESPGSNPEPDATPFQ | |
| | TTTCATGGTGGAGGTGAAGGGCGA | | EGLRTFDQLDAISSLPTPSDIFVS | |
| | CCTGACTGCCAAGAAAATGGTGCT | | YSTFPGFVSVVRDPKSGSVVYVET | |
| | GGCTTTGCTGGAGCTGGCGCgGCA | | LDDIFEQWAHSEDLQSLLLRVAN | |
| | GGACCACGGTGCTCTGGACTGCT | | AVSVKGIYKQMPGCFNFLRKKLF | |
| | GCGTGGTGGTCATTCTCTCTCACG | | FKTSASRA | |
| | GCTGTCAGGCCAGCCACCTGCAGT | | | |
| | TCCCAGGGGCTGTCTACGGCACA | | | |
| | GATGGATGCCCTGTGTCGGTCGAG | | | |
| | AAGATTGTGAACATCTTCAATGGG | | | |
| | ACCAGCTGCCCCAGCCTGGGAGG | | | |
| | GAAGCCCAAGCTCTTTTTCATCCA | | | |
| | GGCCTGTGGTGGGGAGCAGAAAG | | | |
| | AtCATGGGTTTGAGGTGGCCTCCA | | | |
| | CTTCCCCTGAAGACGAGTCCCCTG | | | |
| | GCAGTAACCCCGAGCCAGATGCCA | | | |
| | CCCCGTTCCAGGAAGGTTTGAGGA | | | |
| | CCTTCGACCAGCTGGACGCCATAT | | | |
| | CTAGTTTGCCCACACCCAGTGACA | | | |
| | TCTTTGTGTCCTACTCTACTTTCCC | | | |
| | AGGTTTTGTTTCCTGGAGGGACCC | | | |
| | CAAGAGTGGCTCCTGGTACGTTGA | | | |
| | GACCCTGGACGACATCTTTGAGCA | | | |
| | GTGGGCTCACTCTGAAGACCTGCA | | | |
| | GTCCCTCCTGCTTAGGGTCGCTAA | | | |
| | TGCTGTTTCGGTGAAAGGGATTTA | | | |
| | TAAACAGATGCCTGGTTGCTTTAAT | | | |
| | TTCCTCCGGAAAAAACTTTTCTTTA | | | |
| | AAACATCAGCTAGCAGAGCC | | | |
| Linker | ggatctggaccgcGG | 2022 | GSGPR | 2023 |
| T2A | GAAGGCCGAGGGAGCCTGCTGAC | 2024 | EGRGSLLTCGDVEENPGP | 2025 |
| | ATGTGGCGATGTGGAGGAAAACCC | | | |
| | AGGACCA | | | |
| Linker | CCATGG | 2026 | PW | 2027 |
| Signal | ATGGAGTTTGGACTTTCTTGGTTGT | 2028 | MEFGLSWLFLVAILKGVQCSR | 2029 |
| Peptide | TTTTGGTGGCAATTCTGAAGGGTG | | | |
| | TCCAGTGTAGCAGG | | | |
| PSCA(A11) | GACATCCAACTGACGCAAAGCCCA | 2030 | DIQLTQSPSTLSASMGDRVTITCS | 2031 |
| VL | TCTACACTCAGCGCTAGCATGGGG | | ASSSVRFIHVVYQQKPGKAPKRLI | |
| | GACAGGGTCACAATCACGTGCTCT | | YDTSKLASGVPSRFSGSGSGTDF | |
| | GCCTCAAGTTCCGTTAGGTTTATC | | TLTISSLQPEDFATYYCQQWGSS | |
| | CATTGGTATCAGCAGAAACCTGGA | | PFTFGQGTKVEIK | |
| | AAGGCCCCAAAAAGACTGATCTAT | | | |
| | GATACCAGCAAGCTGGCTTCCGGA | | | |
| | GTGCCCTCAAGGTTCTCAGGATCT | | | |
| | GGCAGTGGGACCGATTTCACCCTG | | | |
| | ACAATTAGCAGCCTTCAGCCAGAG | | | |
| | GATTTCGCAACCTATTACTGTCAGC | | | |
| | AATGGGGGTCCAGCCCATTCACTT | | | |
| | TCGGCCAAGGAACAAAGGTGGAG | | | |
| | ATAAAA | | | |
| Flex | GGCGGAGGAAGCGGAGGTGGGG | 2032 | gggsgggg | 2033 |
| | GC | | | |
| PSCA(A11) | GAGGTGCAGCTCGTGGAGTATGG | 2034 | EVQLVEYGGGLVQPGGSLRLSC | 2035 |
| VH | CGGGGGCCTGGTGCAGCCTGGGG | | AASGFNIKDYYIHVVVRQAPGKGL | |
| | GTAGTCTGAGGCTCTCCTGCGCTG | | EVVVAWIDPENGDTEFVPKFQGR | |
| | CCTCTGGCTTTAACATTAAAGACTA | | ATMSADTSKNTAYLQMNSLRAED | |
| | CTACATACATTGGGTGCGGCAGGC | | TAVYYCKTGGFWGQGTLVTVSS | |
| | CCCAGGCAAAGGGCTCGAATGGG | | | |
| | TGGCCTGGATTGACCCTGAGAATG | | | |
| | GTGACACTGAGTTTGTCCCCAAGT | | | |
| | TTCAGGGCAGAGCCACCATGAGC | | | |
| | GCTGACACAAGCAAAAACACTGCT | | | |
| | TATCTCCAAATGAATAGCCTGCGA | | | |
| | GCTGAAGATACAGCAGTCTATTAC | | | |
| | TGCAAGACGGGAGGATTCTGGGG | | | |
| | CCAGGGAACTCTGGTGACAGTTAG | | | |
| | TTCC | | | |
| Linker | GGATCC | 2036 | gs | 2037 |
| CD34 | GAACTTCCTACTCAGGGGACTTTC | 2038 | ELPTQGTFSNVSTNVS | 2039 |
| epitope | TCAAACGTTAGCACAAACGTAAGT | | | |
| CD8 stalk | CCCGCCCCAAGACCCCCCACACCT | 2040 | PAPRPPTPAPTIASQPLSLRPEAC | 2041 |
| | GCGCCGACCATTGCTTCTCAACCC | | RPAAGGAVHTRGLDFACD | |
| | CTGAGTTTGAGACCCGAGGCCTGC | | | |
| | CGGCCAGCTGCCGGCGGGGCCGT | | | |
| | GCATACAAGAGGACTCGATTTCGC | | | |
| | TTGCGAC | | | |
| CD8 | ATCTATATCTGGGCACCTCTCGCT | 2042 | IYIWAPLAGTCGVLLLSLVITLYC | 2043 |
| trans- | GGCACCTGTGGAGTCCTTCTGCTC | | NHRNRRRVCKCPR | |
| membrane | AGCCTGGTTATTACTCTGTACTGTA | | | |
| | ATCACCGGAATCGCCGCCGCGTTT | | | |
| | GTAAGTGTCCCAGG | | | |
| Linker | GTCGAC | 2044 | VD | 2045 |
| CD3ζ | AGAGTGAAGTTCAGCAGGAGCGCA | 2046 | RVKFSRSADAPAYQQGQNQLYN | 2047 |
| | GACGCCCCCGCGTACCAGCAGGG | | ELNLGRREEYDVLDKRRGRDPE | |
| | CCAGAACCAGCTCTATAACGAGCT | | MGGKPRRKNPQEGLYNELQKDK | |
| | CAATCTAGGACGAAGAGAGGAGTA | | MAEAYSEIGMKGERRRGKGHDG | |
| | CGATGTTTTGGACAAGAGACGTGG | | LYQGLSTATKDTYDALHMQALPP | |
| | CCGGGACCCTGAGATGGGGGGAA | | R | |
| | AGCCGAGAAGGAAGAACCCTCAG | | | |
| | GAAGGCCTGTACAATGAACTGCAG | | | |
| | AAAGATAAGATGGCGGAGGCCTAC | | | |
| | AGTGAGATTGGGATGAAAGGCGAG | | | |
| | CGCCGGAGGGGCAAGGGGCACGA | | | |
| | TGGCCTTTACCAGGGTCTCAGTAC | | | |
| | AGCCACCAAGGACACCTACGACGC | | | |
| | CCTTCACATGCAAGCTCTTCCACC | | | |
| | TCGT | | | |

Appendix 29: pBP1488-pSFG-FRB_{L}.FKBP_{wt}.MC-T2A-αPSCA.Q.CD8stm.ζ

| | | SEQ | | SEQ ID |
|---|---|---|---|---|
| Fragment | Nucleotide | ID NO: | Peptide | NO: |
| FRB_{L} | ATGCAATTGGAAATGTGGCATGAA | 2048 | MQLEMWHEGLEEASRLYFGERN | 2049 |
| | GGGTTGGAAGAAGCTTCAAGGCTG | | VKGMFEVLEPLHAMMERGPQTL | |
| | TACTTCGGAGAGAGGAACGTGAAG | | KETSFNQAYGRDLMEAQEWCRK | |
| | GGCATGTTTGAGGTTCTTGAACCT | | YMKSGNVKDLLQAWDLYYHVFR | |
| | CTGCACGCCATGATGGAACGGGG | | RISK | |
| | ACCGCAGACACTGAAAGAAACCTC | | | |
| | TTTTAATCAGGCCTACGGCAGAGA | | | |
| | CCTGATGGAGGCCCAAGAATGGTG | | | |
| | TAGAAAGTATATGAAATCCGGTAAC | | | |
| | GTGAAAGACCTGCTCCAGGCCTGG | | | |
| | GACCTTTATTACCATGTGTTCAGGC | | | |
| | GGATCAGTAAG | | | |
| Linker | TCAGGCGGTGGCAGCGGCCAATT | 2050 | sgggsgql | 2051 |
| | G | | | |
| FKBP_{WT}′ | GGaGTCCAAGTCGAAACCATTAGT | 2052 | GVQVETISPGDGRTFPKRGQTCV | 2053 |
| | CCCGGCGATGGCAGAACATTTCCT | | VHYTGMLEDGKKFDSSRDRNKP | |
| | ACAAGGGGACAAACATGTGTCGTC | | FKFMLGKQEVIRGVVEEGVAQMS | |
| | CATTATACAGGCATGTTGGAGGAC | | VGQRAKLTISPDYAYGATGHPGII | |
| | GGCAAAAAGTTCGACAGTAGTAGA | | PPHATLVFDVELLKLE | |
| | GATCGCAATAAACCTTTCAAATTCA | | | |
| | TGTTGGGAAAACAAGAAGTCATTA | | | |
| | GGGGATGGGAGGAGGGCGTGGCT | | | |
| | CAAATGTCCGTCGGCCAACGCGCT | | | |
| | AAGCTCACCATCAGCCCCGACTAC | | | |
| | GCATACGGCGCTACCGGACATCCC | | | |
| | GGAATTATTCCCCCTCACGCTACC | | | |
| | TTGGTGTTTGACGTCGAACTGTTG | | | |
| | AAGCTCGAA | | | |
| Linker | GGAAGCATGCGGATCGGA | 2054 | gsmrig | 2055 |
| MyD88 | atggctgcaggaggtcccggcgcggggtctgcgg | 2056 | MAAGGPGAGSAAPVSSTSSLPLA | 2057 |
| | ccccggtctcctccacatcctcccttcccctggctgc | | ALNMRVRRRLSLFLNVRTQVAAD | |
| | tctcaacatgcgagtgcggcgccgcctgtctctgtt | | WTALAEEMDFEYLEIRQLETQAD | |
| | cttgaacgtgcggacacaggtggcggccgactgg | | PTGRLLDAWQGRPGASVGRLLD | |
| | accgcgctggcggaggagatggactttgagtactt | | LLTKLGRDDVLLELGPSIEEDCQK | |
| | ggagatccggcaactggagacacaagcggacc | | YILKQQQEEAEKPLQVAAVDSSV | |
| | ccactggcaggctgctggacgcctggcagggac | | PRTAELAGITTLDDPLGHMPERF | |
| | gccctggcgcctctgtaggccgactgctcgatctgc | | DAFICYCPSDI | |
| | ttaccaagctgggccgcgacgacgtgctgctgga | | | |
| | gctgggacccagcattgaggaggattgccaaaa | | | |
| | gtatatcttgaagcagcagcaggaggaggctgag | | | |
| | aagcctttacaggtggccgctgtagacagcagtgt | | | |
| | cccacggacagcagagctggcgggcatcacca | | | |
| | cacttgatgaccccctggggcatatgcctgagcgtt | | | |
| | tcgatgccttcatctgctattgccccagcgacatc | | | |
| Linker | gtcgag | 2058 | VE | 2059 |
| CD40 | aaaaaggtggccaagaagccaaccaataaggc | 2060 | KKVAKKPTNKAPHPKQEPQEINF | 2061 |
| | cccccaccccaagcaggagccccaggagatca | | PDDLPGSNTAAPVQETLHGCQP | |
| | attttcccgacgatcttcctggctccaacactgctgct | | VTQEDGKESRISVQERQ | |
| | ccagtgcaggagactttacatggatgccaaccggt | | | |
| | cacccaggaggatggcaaagagagtcgcatctc | | | |
| | agtgcaggagagacag | | | |
| Linker | GGCAGTGGGCCGCGG | 2062 | gsgpr | 2063 |
| T2A | GAAGGCCGAGGGAGCCTGCTGAC | 2064 | EGRGSLLTCGDVEENPGP | 2065 |
| | ATGTGGCGATGTGGAGGAAAACCC | | | |
| | AGGACCA | | | |
| Linker | CCATGG | 2066 | PW | 2067 |
| Signal | ATGGAGTTTGGACTTTCTTGGTTGT | 2068 | MEFGLSWLFLVAILKGVQCSR | 2069 |
| Peptide | TTTTGGTGGCAATTCTGAAGGGTG | | | |
| | TCCAGTGTAGCAGG | | | |
| PSCA(A11) | GACATCCAACTGACGCAAAGCCCA | 2070 | DIQLTQSPSTLSASMGDRVTITCS | 2071 |
| VL | TCTACACTCAGCGCTAGCATGGGG | | ASSSVRFIHVVYQQKPGKAPKRLI | |
| | GACAGGGTCACAATCACGTGCTCT | | YDTSKLASGVPSRFSGSGSGTDF | |
| | GCCTCAAGTTCCGTTAGGTTTATC | | TLTISSLQPEDFATYYCQQWGSS | |
| | CATTGGTATCAGCAGAAACCTGGA | | PFTFGQGTKVEIK | |
| | AAGGCCCCAAAAAGACTGATCTAT | | | |
| | GATACCAGCAAGCTGGCTTCCGGA | | | |
| | GTGCCCTCAAGGTTCTCAGGATCT | | | |
| | GGCAGTGGGACCGATTTCACCCTG | | | |
| | ACAATTAGCAGCCTTCAGCCAGAG | | | |
| | GATTTCGCAACCTATTACTGTCAGC | | | |
| | AATGGGGGTCCAGCCCATTCACTT | | | |
| | TCGGCCAAGGAACAAAGGTGGAG | | | |
| | ATAAAA | | | |
| Flex | GGCGGAGGAAGCGGAGGTGGGG | 2072 | gggsgggg | 2073 |
| | GC | | | |
| PSCA(A11) | GAGGTGCAGCTCGTGGAGTATGG | 2074 | EVQLVEYGGGLVQPGGSLRLSC | 2075 |
| VH | CGGGGGCCTGGTGCAGCCTGGGG | | AASGFNIKDYYIHVVVRQAPGKGL | |
| | GTAGTCTGAGGCTCTCCTGCGCTG | | EVVVAWIDPENGDTEFVPKFQGR | |
| | CCTCTGGCTTTAACATTAAAGACTA | | ATMSADTSKNTAYLQMNSLRAED | |
| | CTACATACATTGGGTGCGGCAGGC | | TAVYYCKTGGFWGQGTLVTVSS | |
| | CCCAGGCAAAGGGCTCGAATGGG | | | |
| | TGGCCTGGATTGACCCTGAGAATG | | | |
| | GTGACACTGAGTTTGTCCCCAAGT | | | |
| | TTCAGGGCAGAGCCACCATGAGC | | | |
| | GCTGACACAAGCAAAAACACTGCT | | | |
| | TATCTCCAAATGAATAGCCTGCGA | | | |
| | GCTGAAGATACAGCAGTCTATTAC | | | |
| | TGCAAGACGGGAGGATTCTGGGG | | | |
| | CCAGGGAACTCTGGTGACAGTTAG | | | |
| | TTCC | | | |
| Linker | GGATCC | 2076 | gs | 2077 |
| CD34 | GAACTTCCTACTCAGGGGACTTTC | 2078 | ELPTQGTFSNVSTNVS | 2079 |
| epitope | TCAAACGTTAGCACAAACGTAAGT | | | |
| CD8 stalk | CCCGCCCCAAGACCCCCCACACCT | 2080 | PAPRPPTPAPTIASQPLSLRPEAC | 2081 |
| | GCGCCGACCATTGCTTCTCAACCC | | RPAAGGAVHTRGLDFACD | |
| | CTGAGTTTGAGACCCGAGGCCTGC | | | |
| | CGGCCAGCTGCCGGCGGGGCCGT | | | |
| | GCATACAAGAGGACTCGATTTCGC | | | |
| | TTGCGAC | | | |
| CD8 | ATCTATATCTGGGCACCTCTCGCT | 2082 | IYIWAPLAGTCGVLLLSLVITLYCN | 2083 |
| trans- | GGCACCTGTGGAGTCCTTCTGCTC | | HRNRRRVCKCPR | |
| membrane | AGCCTGGTTATTACTCTGTACTGTA | | | |
| | ATCACCGGAATCGCCGCCGCGTTT | | | |
| | GTAAGTGTCCCAGG | | | |
| Linker | GTCGAC | 2084 | VD | 2085 |
| CD3ζ | AGAGTGAAGTTCAGCAGGAGCGCA | 2086 | RVKFSRSADAPAYQQGQNQLYN | 2087 |
| | GACGCCCCCGCGTACCAGCAGGG | | ELNLGRREEYDVLDKRRGRDPE | |
| | CCAGAACCAGCTCTATAACGAGCT | | MGGKPRRKNPQEGLYNELQKDK | |
| | CAATCTAGGACGAAGAGAGGAGTA | | MAEAYSEIGMKGERRRGKGHDG | |
| | CGATGTTTTGGACAAGAGACGTGG | | LYQGLSTATKDTYDALHMQALPP | |
| | CCGGGACCCTGAGATGGGGGGAA | | R | |
| | AGCCGAGAAGGAAGAACCCTCAG | | | |
| | GAAGGCCTGTACAATGAACTGCAG | | | |
| | AAAGATAAGATGGCGGAGGCCTAC | | | |
| | AGTGAGATTGGGATGAAAGGCGAG | | | |
| | CGCCGGAGGGGCAAGGGGCACGA | | | |
| | TGGCCTTTACCAGGGTCTCAGTAC | | | |
| | AGCCACCAAGGACACCTACGACGC | | | |
| | CCTTCACATGCAAGCTCTTCCACC | | | |
| | TCGT | | | |

Appendix 30: pBP1491-pSFG-FKBPv.ΔC9.P2A.MC.FKBP_{wt}.FRB_{L}.T2A-αHER2.Q.CD8stm.ζ

| | | SEQ | | SEQ ID |
|---|---|---|---|---|
| Fragment | Nucleotide | ID NO: | Peptide | NO: |
| Linker | atgcatATGCTGGAG | 2088 | MHMLE | 2089 |
| FKBPv | GGAGTGCAGGTGGAGACTATTAGC | 2090 | GVQVETISPGDGRTFPKRGQTCV | 2091 |
| | CCCGGAGATGGCAGAACATTCCCC | | VHYTGMLEDGKKVDSSRDRNKP | |
| | AAAAGAGGACAGACTTGCGTCGTG | | FKFMLGKQEVIRGVVEEGVAQMS | |
| | CATTATACTGGAATGCTGGAAGAC | | VGQRAKLTISPDYAYGATGHPGII | |
| | GGCAAGAAGGTGGACAGCAGCCG | | PPHATLVFDVELLKLE | |
| | GGACCGAAACAAGCCCTTCAAGTT | | | |
| | CATGCTGGGGAAGCAGGAAGTGAT | | | |
| | CCGGGGCTGGGAGGAAGGAGTCG | | | |
| | CACAGATGTCAGTGGGACAGAGG | | | |
| | GCCAAACTGACTATTAGCCCAGAC | | | |
| | TACGCTTATGGAGCAACCGGCCAC | | | |
| | CCCGGGATCATTCCCCCTCATGCT | | | |
| | ACACTGGTCTTCGATGTGGAGCTG | | | |
| | CTGAAGCTGGAA | | | |
| Linker | TCAGGCGGTGGCTCAGGTGTGGA | 2092 | SGGGSGVD | 2093 |
| | C | | | |
| Δcaspase9 | GGATTTGGTGATGTCGGTGCTCTT | 2094 | GFGDVGALESLRGNADLAYILSM | 2095 |
| | GAGAGTTTGAGGGGAAATGCAGAT | | EPCGHCLIINNVNFCRESGLRTRT | |
| | TTGGCTTACATCCTGAGCATGGAG | | GSNIDCEKLRRRFSSLHFMVEVK | |
| | CCCTGTGGCCACTGCCTCATTATC | | GDLTAKKMVLALLELARQDHGAL | |
| | AACAATGTGAACTTCTGCCGTGAG | | DCCVVVILSHGCQASHLQFPGAV | |
| | TCCGGGCTCCGCACCCGCACTGG | | YGTDGCPVSVEKIVNIFNGTSCPS | |
| | CTCCAACATCGACTGTGAGAAGTT | | LGGKPKLFFIQACGGEQKDHGFE | |
| | GCGGCGTCGCTTCTCCTCGCTGCA | | VASTSPEDESPGSNPEPDATPFQ | |
| | TTTCATGGTGGAGGTGAAGGGCGA | | EGLRTFDQLDAISSLPTPSDIFVS | |
| | CCTGACTGCCAAGAAAATGGTGCT | | YSTFPGFVSVVRDPKSGSVVYVET | |
| | GGCTTTGCTGGAGCTGGCGCgGCA | | LDDIFEQWAHSEDLQSLLLRVAN | |
| | GGACCACGGTGCTCTGGACTGCT | | AVSVKGIYKQMPGCFNFLRKKLF | |
| | GCGTGGTGGTCATTCTCTCTCACG | | FKTSASRA | |
| | GCTGTCAGGCCAGCCACCTGCAGT | | | |
| | TCCCAGGGGCTGTCTACGGCACA | | | |
| | GATGGATGCCCTGTGTCGGTCGAG | | | |
| | AAGATTGTGAACATCTTCAATGGG | | | |
| | ACCAGCTGCCCCAGCCTGGGAGG | | | |
| | GAAGCCCAAGCTCTTTTTCATCCA | | | |
| | GGCCTGTGGTGGGGAGCAGAAAG | | | |
| | AtCATGGGTTTGAGGTGGCCTCCA | | | |
| | CTTCCCCTGAAGACGAGTCCCCTG | | | |
| | GCAGTAACCCCGAGCCAGATGCCA | | | |
| | CCCCGTTCCAGGAAGGTTTGAGGA | | | |
| | CCTTCGACCAGCTGGACGCCATAT | | | |
| | CTAGTTTGCCCACACCCAGTGACA | | | |
| | TCTTTGTGTCCTACTCTACTTTCCC | | | |
| | AGGTTTTGTTTCCTGGAGGGACCC | | | |
| | CAAGAGTGGCTCCTGGTACGTTGA | | | |
| | GACCCTGGACGACATCTTTGAGCA | | | |
| | GTGGGCTCACTCTGAAGACCTGCA | | | |
| | GTCCCTCCTGCTTAGGGTCGCTAA | | | |
| | TGCTGTTTCGGTGAAAGGGATTTA | | | |
| | TAAACAGATGCCTGGTTGCTTTAAT | | | |
| | TTCCTCCGGAAAAAACTTTTCTTTA | | | |
| | AAACATCAGCTAGCAGAGCC | | | |
| Linker | agcggCCGCaggtagcggg | 2096 | aaaGSG | 2097 |
| MyD88 | atggctgcaggaggtcccggcgcggggtctgcgg | 2098 | MAAGGPGAGSAAPVSSTSSLPLA | 2099 |
| | ccccggtctcctccacatcctcccttcccctggctgc | | ALNMRVRRRLSLFLNVRTQVAAD | |
| | tctcaacatgcgagtgcggcgccgcctgtctctgtt | | WTALAEEMDFEYLEIRQLETQAD | |
| | cttgaacgtgcggacacaggtggcggccgactgg | | PTGRLLDAWQGRPGASVGRLLD | |
| | accgcgctggcggaggagatggactttgagtactt | | LLTKLGRDDVLLELGPSIEEDCQK | |
| | ggagatccggcaactggagacacaagcggacc | | YILKQQQEEAEKPLQVAAVDSSV | |
| | ccactggcaggctgctggacgcctggcagggac | | PRTAELAGITTLDDPLGHMPERF | |
| | gccctggcgcctctgtaggccgactgctcgatctgc | | DAFICYCPSDI | |
| | ttaccaagctgggccgcgacgacgtgctgctgga | | | |
| | gctgggacccagcattgaggaggattgccaaaa | | | |
| | gtatatcttgaagcagcagcaggaggaggctgag | | | |
| | aagcctttacaggtggccgctgtagacagcagtgt | | | |
| | cccacggacagcagagctggcgggcatcacca | | | |
| | cacttgatgaccccctggggcatatgcctgagcgtt | | | |
| | tcgatgccttcatctgctattgccccagcgacatc | | | |
| Linker | gtcgag | 2100 | VE | 2101 |
| CD40 | aaaaaggtggccaagaagccaaccaataaggc | 2102 | KKVAKKPTNKAPHPKQEPQEINF | 2103 |
| | cccccaccccaagcaggagccccaggagatca | | PDDLPGSNTAAPVQETLHGCQP | |
| | attttcccgacgatcttcctggctccaacactgctgct | | VTQEDGKESRISVQERQ | |
| | ccagtgcaggagactttacatggatgccaaccggt | | | |
| | cacccaggaggatggcaaagagagtcgcatctc | | | |
| | agtgcaggagagacag | | | |
| Linker | gcggCCGCaggtagcggg | 2104 | aaaGSG | 2105 |
| P2A | GCAACGAATTTTTCCCTGCTGAAA | 2106 | ATNFSLLKQAGDVEENPGP | 2107 |
| | CAGGCAGGGGACGTAGAGGAAAA | | | |
| | TCCTGGTCCT | | | |
| Linker | gtcgag | 2108 | VE | 2109 |
| FKBP_{WT}' | GGCGTCCAAGTCGAAACCATTAGT | 2110 | GVQVETISPGDGRTFPKRGQTCV | 2111 |
| | CCCGGCGATGGCAGAACATTTCCT | | VHYTGMLEDGKKFDSSRDRNKP | |
| | ACAAGGGGACAAACATGTGTCGTC | | FKFMLGKQEVIRGVVEEGVAQMS | |
| | CATTATACAGGCATGTTGGAGGAC | | VGQRAKLTISPDYAYGATGHPGII | |
| | GGCAAAAAGTTCGACAGTAGTAGA | | PPHATLVFDVELLKLE | |
| | GATCGCAATAAACCTTTCAAATTCA | | | |
| | TGTTGGGAAAACAAGAAGTCATTA | | | |
| | GGGGATGGGAGGAGGGCGTGGCT | | | |
| | CAAATGTCCGTCGGCCAACGCGCT | | | |
| | AAGCTCACCATCAGCCCCGACTAC | | | |
| | GCATACGGCGCTACCGGACATCCC | | | |
| | GGAATTATTCCCCCTCACGCTACC | | | |
| | TTGGTGTTTGACGTCGAACTGTTG | | | |
| | AAGCTCGAA | | | |
| Linker | gtcgag | 2112 | VE | 2113 |
| FRB_{L} | CAATTGGAAATGTGGCATGAAGGG | 2114 | QLEMWHEGLEEASRLYFGERNV | 2115 |
| | TTGGAAGAAGCTTCAAGGCTGTAC | | KGMFEVLEPLHAMMERGPQTLK | |
| | TTCGGAGAGAGGAACGTGAAGGG | | ETSFNQAYGRDLMEAQEWCRKY | |
| | CATGTTTGAGGTTCTTGAACCTCTG | | MKSGNVKDLLQAWDLYYHVFRRI | |
| | CACGCCATGATGGAACGGGGACC | | SK | |
| | GCAGACACTGAAAGAAACCTCTTT | | | |
| | TAATCAGGCCTACGGCAGAGACCT | | | |
| | GATGGAGGCCCAAGAATGGTGTAG | | | |
| | AAAGTATATGAAATCCGGTAACGT | | | |
| | GAAAGACCTGCTCCAGGCCTGGG | | | |
| | ACCTTTATTACCATGTGTTCAGGCG | | | |
| | GATCAGTAAG | | | |
| Linker | ggatctggaccgcgg | 2118 | GSGpr | 2119 |
| T2A | GAAGGCCGAGGGAGCCTGCTGAC | 2120 | EGRGSLLTCGDVEENPGP | 2121 |
| | ATGTGGCGATGTGGAGGAAAACCC | | | |
| | AGGACCA | | | |
| Linker | GCATGCGCCACC | 2122 | ACAT | 2123 |
| Signal | ATGGAGTTTGGGTTGTCATGGTTG | 2124 | MEFGLSWLFLVAILKGVQCSR | 2125 |
| Peptide | TTTCTCGTCGCTATTCTCAAAGGTG | | | |
| | TACAATGCTCCCGC | | | |
| HER2(FRP5) | GAAGTCCAATTGCAACAGTCAGGC | 2126 | EVQLQQSGPELKKPGETVKISCK | 2127 |
| VH | CCCGAATTGAAAAAGCCCGGCGAA | | ASGYPFTNYGMNVVVKQAPGQGL | |
| | ACAGTGAAGATATCTTGTAAAGCCT | | KWMGWINTSTGESTFADDFKGR | |
| | CCGGTTACCCTTTTACGAACTATG | | FDFSLETSANTAYLQINNLKSEDM | |
| | GAATGAACTGGGTCAAACAAGCCC | | ATYFCARWEVYHGYVPYWGQGT | |
| | CTGGACAGGGATTGAAGTGGATGG | | TVTVSS | |
| | GATGGATCAATACATCAACAGGCG | | | |
| | AGTCTACCTTCGCAGATGATTTCAA | | | |
| | AGGTCGCTTTGACTTCTCACTGGA | | | |
| | GACCAGTGCAAATACCGCCTACCT | | | |
| | TCAGATTAACAATCTTAAAAGCGAG | | | |
| | GATATGGCAACCTACTTTTGCGCA | | | |
| | AGATGGGAAGTTTATCACGGGTAC | | | |
| | GTGCCATACTGGGGACAAGGAAC | | | |
| | GACAGTGACAGTTAGTAGC | | | |
| Flex | GGCGGTGGAGGCTCCGGTGGAGG | 2128 | GGGGSGGGGSGGGGS | 2129 |
| | CGGCTCTGGAGGAGGAGGTTCA | | | |
| HER2(FRP5) | GACATCCAATTGACACAATCACAC | 2130 | EVQLVEYGGGLVQPGGSLRLSC | 2131 |
| VL | AAATTTCTCTCAACTTCTGTAGGAG | | AASGFNIKDYYIHVVVRQAPGKGL | |
| | ACAGAGTGAGCATAACCTGCAAAG | | EVVVAWIDPENGDTEFVPKFQGR | |
| | CATCCCAGGACGTGTACAATGCTG | | ATMSADTSKNTAYLQMNSLRAED | |
| | TGGCTTGGTACCAACAGAAGCCTG | | TAVYYCKTGGFWGQGTLVTVSS | |
| | GACAATCCCCAAAATTGCTGATTTA | | | |
| | TTCTGCCTCTAGTAGGTACACTGG | | | |
| | GGTACCTTCTCGGTTTACGGGCTC | | | |
| | TGGGTCCGGACCAGATTTCACGTT | | | |
| | CACAATCAGTTCCGTTCAAGCTGA | | | |
| | AGACCTCGCTGTTTATTTTTGCCAG | | | |
| | CAGCACTTCCGAACCCCTTTTACTT | | | |
| | TTGGCTCAGGCACTAAGTTGGAAA | | | |
| | TCAAGGCTTTG | | | |
| Linker | atgcat | 2132 | MH | 2133 |
| CD34 | GAACTTCCTACTCAGGGGACTTTC | 2134 | ELPTQGTFSNVSTNVS | 2135 |
| epitope | TCAAACGTTAGCACAAACGTAAGT | | | |
| CD3ζ | AGAGTGAAGTTCAGCAGGAGCGCA | 2136 | RVKFSRSADAPAYQQGQNQLYN | 2137 |
| | GACGCCCCCGCGTACCAGCAGGG | | ELNLGRREEYDVLDKRRGRDPE | |
| | CCAGAACCAGCTCTATAACGAGCT | | MGGKPRRKNPQEGLYNELQKDK | |
| | CAATCTAGGACGAAGAGAGGAGTA | | MAEAYSEIGMKGERRRGKGHDG | |
| | CGATGTTTTGGACAAGAGACGTGG | | LYQGLSTATKDTYDALHMQALPP | |
| | CCGGGACCCTGAGATGGGGGGAA | | R | |
| | AGCCGAGAAGGAAGAACCCTCAG | | | |
| | GAAGGCCTGTACAATGAACTGCAG | | | |
| | AAAGATAAGATGGCGGAGGCCTAC | | | |
| | AGTGAGATTGGGATGAAAGGCGAG | | | |
| | CGCCGGAGGGGCAAGGGGCACGA | | | |
| | TGGCCTTTACCAGGGTCTCAGTAC | | | |
| | AGCCACCAAGGACACCTACGACGC | | | |
| | CCTTCACATGCAAGCTCTTCCACC | | | |
| | TCGT | | | |

Appendix 31: pBP1493-pSFG-MC.FKBP_{wt}.FRB_{L}-P2A.FKBPᵥ.ΔC9.T2A-αHER2.Q.CD8stm.ζ

| | | SEQ | | SEQ ID |
|---|---|---|---|---|
| Fragment | Nucleotide | ID NO: | Peptide | NO: |
| MyD88 | atggctgcaggaggtcccggcgcggggtctgcgg | 2138 | MAAGGPGAGSAAPVSSTSSLPLA | 2139 |
| | ccccggtctcctccacatcctcccttcccctggctgc | | ALNMRVRRRLSLFLNVRTQVAAD | |
| | tctcaacatgcgagtgcggcgccgcctgtctctgtt | | WTALAEEMDFEYLEIRQLETQAD | |
| | cttgaacgtgcggacacaggtggcggccgactgg | | PTGRLLDAWQGRPGASVGRLLD | |
| | accgcgctggcggaggagatggactttgagtactt | | LLTKLGRDDVLLELGPSIEEDCQK | |
| | ggagatccggcaactggagacacaagcggacc | | YILKQQQEEAEKPLQVAAVDSSV | |
| | ccactggcaggctgctggacgcctggcagggac | | PRTAELAGITTLDDPLGHMPERF | |
| | gccctggcgcctctgtaggccgactgctcgatctgc | | DAFICYCPSDI | |
| | ttaccaagctgggccgcgacgacgtgctgctgga | | | |
| | gctgggacccagcattgaggaggattgccaaaa | | | |
| | gtatatcttgaagcagcagcaggaggaggctgag | | | |
| | aagcctttacaggtggccgctgtagacagcagtgt | | | |
| | cccacggacagcagagctggcgggcatcacca | | | |
| | cacttgatgaccccctggggcatatgcctgagcgtt | | | |
| | tcgatgccttcatctgctattgccccagcgacatc | | | |
| Linker | gtcgag | 2140 | VE | 2141 |
| CD40 | aaaaaggtggccaagaagccaaccaataaggc | 2142 | KKVAKKPTNKAPHPKQEPQEINF | 2143 |
| | cccccaccccaagcaggagccccaggagatca | | PDDLPGSNTAAPVQETLHGCQP | |
| | attttcccgacgatcttcctggctccaacactgctgct | | VTQEDGKESRISVQERQ | |
| | ccagtgcaggagactttacatggatgccaaccggt | | | |
| | cacccaggaggatggcaaagagagtcgcatctc | | | |
| | agtgcaggagagacag | | | |
| Linker | gtcgag | 2144 | VE | 2145 |
| FKBP_{WT}' | GGCGTCCAAGTCGAAACCATTAGT | 2146 | GVQVETISPGDGRTFPKRGQTCV | 2147 |
| | CCCGGCGATGGCAGAACATTTCCT | | VHYTGMLEDGKKFDSSRDRNKP | |
| | ACAAGGGGACAAACATGTGTCGTC | | FKFMLGKQEVIRGVVEEGVAQMS | |
| | CATTATACAGGCATGTTGGAGGAC | | VGQRAKLTISPDYAYGATGHPGII | |
| | GGCAAAAAGTTCGACAGTAGTAGA | | PPHATLVFDVELLKLE | |
| | GATCGCAATAAACCTTTCAAATTCA | | | |
| | TGTTGGGAAAACAAGAAGTCATTA | | | |
| | GGGGATGGGAGGAGGGCGTGGCT | | | |
| | CAAATGTCCGTCGGCCAACGCGCT | | | |
| | AAGCTCACCATCAGCCCCGACTAC | | | |
| | GCATACGGCGCTACCGGACATCCC | | | |
| | GGAATTATTCCCCCTCACGCTACC | | | |
| | TTGGTGTTTGACGTCGAACTGTTG | | | |
| | AAGCTCGAA | | | |
| Linker | gtcgag | 2148 | VE | 2149 |
| FRB_{L} | CAATTGGAAATGTGGCATGAAGGG | 2150 | QLEMWHEGLEEASRLYFGERNV | 2151 |
| | TTGGAAGAAGCTTCAAGGCTGTAC | | KGMFEVLEPLHAMMERGPQTLK | |
| | TTCGGAGAGAGGAACGTGAAGGG | | ETSFNQAYGRDLMEAQEWCRKY | |
| | CATGTTTGAGGTTCTTGAACCTCTG | | MKSGNVKDLLQAWDLYYHVFRRI | |
| | CACGCCATGATGGAACGGGGACC | | SK | |
| | GCAGACACTGAAAGAAACCTCTTT | | | |
| | TAATCAGGCCTACGGCAGAGACCT | | | |
| | GATGGAGGCCCAAGAATGGTGTAG | | | |
| | AAAGTATATGAAATCCGGTAACGT | | | |
| | GAAAGACCTGCTCCAGGCCTGGG | | | |
| | ACCTTTATTACCATGTGTTCAGGCG | | | |
| | GATCAGTAAG | | | |
| Linker | gcggCCGCaggtagcggg | 2152 | aaaGSG | 2153 |
| P2A | GCAACGAATTTTTCCCTGCTGAAA | 2154 | ATNFSLLKQAGDVEENPGP | 2155 |
| | CAGGCAGGGGACGTAGAGGAAAA | | | |
| | TCCTGGTCCT | | | |
| Linker | ggatctgga | 2156 | GSG | 2157 |
| FKBPv | GGAGTGCAGGTGGAGACTATTAGC | 2158 | GVQVETISPGDGRTFPKRGQTCV | 2159 |
| | CCCGGAGATGGCAGAACATTCCCC | | VHYTGMLEDGKKVDSSRDRNKP | |
| | AAAAGAGGACAGACTTGCGTCGTG | | FKFMLGKQEVIRGVVEEGVAQMS | |
| | CATTATACTGGAATGCTGGAAGAC | | VGQRAKLTISPDYAYGATGHPGII | |
| | GGCAAGAAGGTGGACAGCAGCCG | | PPHATLVFDVELLKLE | |
| | GGACCGAAACAAGCCCTTCAAGTT | | | |
| | CATGCTGGGGAAGCAGGAAGTGAT | | | |
| | CCGGGGCTGGGAGGAAGGAGTCG | | | |
| | CACAGATGTCAGTGGGACAGAGG | | | |
| | GCCAAACTGACTATTAGCCCAGAC | | | |
| | TACGCTTATGGAGCAACCGGCCAC | | | |
| | CCCGGGATCATTCCCCCTCATGCT | | | |
| | ACACTGGTCTTCGATGTGGAGCTG | | | |
| | CTGAAGCTGGAA | | | |
| Linker | TCAGGCGGTGGCTCAGGTGTGGA | 2160 | SGGGSGVD | 2161 |
| | C | | | |
| Δcaspase9 | GGATTTGGTGATGTCGGTGCTCTT | 2162 | GFGDVGALESLRGNADLAYILSM | 2163 |
| | GAGAGTTTGAGGGGAAATGCAGAT | | EPCGHCLIINNVNFCRESGLRTRT | |
| | TTGGCTTACATCCTGAGCATGGAG | | GSNIDCEKLRRRFSSLHFMVEVK | |
| | CCCTGTGGCCACTGCCTCATTATC | | GDLTAKKMVLALLELARQDHGAL | |
| | AACAATGTGAACTTCTGCCGTGAG | | DCCVVVILSHGCQASHLQFPGAV | |
| | TCCGGGCTCCGCACCCGCACTGG | | YGTDGCPVSVEKIVNIFNGTSCPS | |
| | CTCCAACATCGACTGTGAGAAGTT | | LGGKPKLFFIQACGGEQKDHGFE | |
| | GCGGCGTCGCTTCTCCTCGCTGCA | | VASTSPEDESPGSNPEPDATPFQ | |
| | TTTCATGGTGGAGGTGAAGGGCGA | | EGLRTFDQLDAISSLPTPSDIFVS | |
| | CCTGACTGCCAAGAAAATGGTGCT | | YSTFPGFVSVVRDPKSGSVVYVET | |
| | GGCTTTGCTGGAGCTGGCGCgGCA | | LDDIFEQWAHSEDLQSLLLRVAN | |
| | GGACCACGGTGCTCTGGACTGCT | | AVSVKGIYKQMPGCFNFLRKKLF | |
| | GCGTGGTGGTCATTCTCTCTCACG | | FKTSASRA | |
| | GCTGTCAGGCCAGCCACCTGCAGT | | | |
| | TCCCAGGGGCTGTCTACGGCACA | | | |
| | GATGGATGCCCTGTGTCGGTCGAG | | | |
| | AAGATTGTGAACATCTTCAATGGG | | | |
| | ACCAGCTGCCCCAGCCTGGGAGG | | | |
| | GAAGCCCAAGCTCTTTTTCATCCA | | | |
| | GGCCTGTGGTGGGGAGCAGAAAG | | | |
| | AtCATGGGTTTGAGGTGGCCTCCA | | | |
| | CTTCCCCTGAAGACGAGTCCCCTG | | | |
| | GCAGTAACCCCGAGCCAGATGCCA | | | |
| | CCCCGTTCCAGGAAGGTTTGAGGA | | | |
| | CCTTCGACCAGCTGGACGCCATAT | | | |
| | CTAGTTTGCCCACACCCAGTGACA | | | |
| | TCTTTGTGTCCTACTCTACTTTCCC | | | |
| | AGGTTTTGTTTCCTGGAGGGACCC | | | |
| | CAAGAGTGGCTCCTGGTACGTTGA | | | |
| | GACCCTGGACGACATCTTTGAGCA | | | |
| | GTGGGCTCACTCTGAAGACCTGCA | | | |
| | GTCCCTCCTGCTTAGGGTCGCTAA | | | |
| | TGCTGTTTCGGTGAAAGGGATTTA | | | |
| | TAAACAGATGCCTGGTTGCTTTAAT | | | |
| | TTCCTCCGGAAAAAACTTTTCTTTA | | | |
| | AAACATCAGCTAGCAGAGCC | | | |
| Linker | ggatctggaccgcGG | 2164 | GSGPR | 2165 |
| T2A | GAAGGCCGAGGGAGCCTGCTGAC | 2166 | EGRGSLLTCGDVEENPGP | 2167 |
| | ATGTGGCGATGTGGAGGAAAACCC | | | |
| | AGGACCA | | | |
| Linker | GCATGCGCCACC | 2168 | ACAT | 2169 |
| Signal | ATGGAGTTTGGGTTGTCATGGTTG | 2170 | MEFGLSWLFLVAILKGVQCSR | 2171 |
| Peptide | TTTCTCGTCGCTATTCTCAAAGGTG | | | |
| | TACAATGCTCCCGC | | | |
| HER2(FRP5) | GAAGTCCAATTGCAACAGTCAGGC | 2172 | EVQLQQSGPELKKPGETVKISCK | 2173 |
| VH | CCCGAATTGAAAAAGCCCGGCGAA | | ASGYPFTNYGMNVVVKQAPGQGL | |
| | ACAGTGAAGATATCTTGTAAAGCCT | | KWMGWINTSTGESTFADDFKGR | |
| | CCGGTTACCCTTTTACGAACTATG | | FDFSLETSANTAYLQINNLKSEDM | |
| | GAATGAACTGGGTCAAACAAGCCC | | ATYFCARWEVYHGYVPYWGQGT | |
| | CTGGACAGGGATTGAAGTGGATGG | | TVTVSS | |
| | GATGGATCAATACATCAACAGGCG | | | |
| | AGTCTACCTTCGCAGATGATTTCAA | | | |
| | AGGTCGCTTTGACTTCTCACTGGA | | | |
| | GACCAGTGCAAATACCGCCTACCT | | | |
| | TCAGATTAACAATCTTAAAAGCGAG | | | |
| | GATATGGCAACCTACTTTTGCGCA | | | |
| | AGATGGGAAGTTTATCACGGGTAC | | | |
| | GTGCCATACTGGGGACAAGGAAC | | | |
| | GACAGTGACAGTTAGTAGC | | | |
| Flex | GGCGGTGGAGGCTCCGGTGGAGG | 2174 | GGGGSGGGGSGGGGS | 2175 |
| | CGGCTCTGGAGGAGGAGGTTCA | | | |
| HER2(FRP5) | GACATCCAATTGACACAATCACAC | 2176 | EVQLVEYGGGLVQPGGSLRLSC | 2177 |
| VL | AAATTTCTCTCAACTTCTGTAGGAG | | AASGFNIKDYYIHVVVRQAPGKGL | |
| | ACAGAGTGAGCATAACCTGCAAAG | | EVVVAWIDPENGDTEFVPKFQGR | |
| | CATCCCAGGACGTGTACAATGCTG | | ATMSADTSKNTAYLQMNSLRAED | |
| | TGGCTTGGTACCAACAGAAGCCTG | | TAVYYCKTGGFWGQGTLVTVSS | |
| | GACAATCCCCAAAATTGCTGATTTA | | | |
| | TTCTGCCTCTAGTAGGTACACTGG | | | |
| | GGTACCTTCTCGGTTTACGGGCTC | | | |
| | TGGGTCCGGACCAGATTTCACGTT | | | |
| | CACAATCAGTTCCGTTCAAGCTGA | | | |
| | AGACCTCGCTGTTTATTTTTGCCAG | | | |
| | CAGCACTTCCGAACCCCTTTTACTT | | | |
| | TTGGCTCAGGCACTAAGTTGGAAA | | | |
| | TCAAGGCTTTG | | | |
| Linker | atgcat | 2178 | MH | 2179 |
| CD34 | GAACTTCCTACTCAGGGGACTTTC | 2180 | ELPTQGTFSNVSTNVS | 2181 |
| epitope | TCAAACGTTAGCACAAACGTAAGT | | | |
| CD3ζ | AGAGTGAAGTTCAGCAGGAGCGCA | 2182 | RVKFSRSADAPAYQQGQNQLYN | 2183 |
| | GACGCCCCCGCGTACCAGCAGGG | | ELNLGRREEYDVLDKRRGRDPE | |
| | CCAGAACCAGCTCTATAACGAGCT | | MGGKPRRKNPQEGLYNELQKDK | |
| | CAATCTAGGACGAAGAGAGGAGTA | | MAEAYSEIGMKGERRRGKGHDG | |
| | CGATGTTTTGGACAAGAGACGTGG | | LYQGLSTATKDTYDALHMQALPP | |
| | CCGGGACCCTGAGATGGGGGGAA | | R | |
| | AGCCGAGAAGGAAGAACCCTCAG | | | |
| | GAAGGCCTGTACAATGAACTGCAG | | | |
| | AAAGATAAGATGGCGGAGGCCTAC | | | |
| | AGTGAGATTGGGATGAAAGGCGAG | | | |
| | CGCCGGAGGGGCAAGGGGCACGA | | | |
| | TGGCCTTTACCAGGGTCTCAGTAC | | | |
| | AGCCACCAAGGACACCTACGACGC | | | |
| | CCTTCACATGCAAGCTCTTCCACC | | | |
| | TCGT | | | |

Appendix 32: pBP1494-pSFG-MC.FKBP_{wt}.FRB_{L}-P2A.FKBPᵥ.ΔC9.T2A-PSCA.Q.CD8stm.ζ

| | | SEQ | | SEQ ID |
|---|---|---|---|---|
| Fragment | Nucleotide | ID NO: | Peptide | NO: |
| MyD88 | atggctgcaggaggtcccggcgcggggtctgcgg | 2184 | MAAGGPGAGSAAPVSSTSSLPLA | 2185 |
| | ccccggtctcctccacatcctcccttcccctggctgc | | ALNMRVRRRLSLFLNVRTQVAAD | |
| | tctcaacatgcgagtgcggcgccgcctgtctctgtt | | WTALAEEMDFEYLEIRQLETQAD | |
| | cttgaacgtgcggacacaggtggcggccgactgg | | PTGRLLDAWQGRPGASVGRLLD | |
| | accgcgctggcggaggagatggactttgagtactt | | LLTKLGRDDVLLELGPSIEEDCQK | |
| | ggagatccggcaactggagacacaagcggacc | | YILKQQQEEAEKPLQVAAVDSSV | |
| | ccactggcaggctgctggacgcctggcagggac | | PRTAELAGITTLDDPLGHMPERF | |
| | gccctggcgcctctgtaggccgactgctcgatctgc | | DAFICYCPSDI | |
| | ttaccaagctgggccgcgacgacgtgctgctgga | | | |
| | gctgggacccagcattgaggaggattgccaaaa | | | |
| | gtatatcttgaagcagcagcaggaggaggctgag | | | |
| | aagcctttacaggtggccgctgtagacagcagtgt | | | |
| | cccacggacagcagagctggcgggcatcacca | | | |
| | cacttgatgaccccctggggcatatgcctgagcgtt | | | |
| | tcgatgccttcatctgctattgccccagcgacatc | | | |
| Linker | gtcgag | 2186 | VE | 2187 |
| CD40 | aaaaaggtggccaagaagccaaccaataaggc | 2188 | KKVAKKPTNKAPHPKQEPQEINF | 2189 |
| | cccccaccccaagcaggagccccaggagatca | | PDDLPGSNTAAPVQETLHGCQP | |
| | attttcccgacgatcttcctggctccaacactgctgct | | VTQEDGKESRISVQERQ | |
| | ccagtgcaggagactttacatggatgccaaccggt | | | |
| | cacccaggaggatggcaaagagagtcgcatctc | | | |
| | agtgcaggagagacag | | | |
| Linker | gtcgag | 2190 | VE | 2191 |
| FKBP_{WT}' | GGCGTCCAAGTCGAAACCATTAGT | 2192 | GVQVETISPGDGRTFPKRGQTCV | 2193 |
| | CCCGGCGATGGCAGAACATTTCCT | | VHYTGMLEDGKKFDSSRDRNKP | |
| | ACAAGGGGACAAACATGTGTCGTC | | FKFMLGKQEVIRGVVEEGVAQMS | |
| | CATTATACAGGCATGTTGGAGGAC | | VGQRAKLTISPDYAYGATGHPGII | |
| | GGCAAAAAGTTCGACAGTAGTAGA | | PPHATLVFDVELLKLE | |
| | GATCGCAATAAACCTTTCAAATTCA | | | |
| | TGTTGGGAAAACAAGAAGTCATTA | | | |
| | GGGGATGGGAGGAGGGCGTGGCT | | | |
| | CAAATGTCCGTCGGCCAACGCGCT | | | |
| | AAGCTCACCATCAGCCCCGACTAC | | | |
| | GCATACGGCGCTACCGGACATCCC | | | |
| | GGAATTATTCCCCCTCACGCTACC | | | |
| | TTGGTGTTTGACGTCGAACTGTTG | | | |
| | AAGCTCGAA | | | |
| Linker | gtcgag | 2194 | VE | 2195 |
| FRB_{L} | CAATTGGAAATGTGGCATGAAGGG | 2196 | QLEMWHEGLEEASRLYFGERNV | 2197 |
| | TTGGAAGAAGCTTCAAGGCTGTAC | | KGMFEVLEPLHAMMERGPQTLK | |
| | TTCGGAGAGAGGAACGTGAAGGG | | ETSFNQAYGRDLMEAQEWCRKY | |
| | CATGTTTGAGGTTCTTGAACCTCTG | | MKSGNVKDLLQAWDLYYHVFRRI | |
| | CACGCCATGATGGAACGGGGACC | | SK | |
| | GCAGACACTGAAAGAAACCTCTTT | | | |
| | TAATCAGGCCTACGGCAGAGACCT | | | |
| | GATGGAGGCCCAAGAATGGTGTAG | | | |
| | AAAGTATATGAAATCCGGTAACGT | | | |
| | GAAAGACCTGCTCCAGGCCTGGG | | | |
| | ACCTTTATTACCATGTGTTCAGGCG | | | |
| | GATCAGTAAG | | | |
| Linker | gcggCCGCaggtagcggg | 2198 | aaaGSG | 2199 |
| P2A | GCAACGAATTTTTCCCTGCTGAAA | 2200 | ATNFSLLKQAGDVEENPGP | 2201 |
| | CAGGCAGGGGACGTAGAGGAAAA | | | |
| | TCCTGGTCCT | | | |
| Linker | atgcatATGCTGGAG | 2202 | MHMLE | 2203 |
| FKBPv | GGAGTGCAGGTGGAGACTATTAGC | 2204 | GVQVETISPGDGRTFPKRGQTCV | 2205 |
| | CCCGGAGATGGCAGAACATTCCCC | | VHYTGMLEDGKKVDSSRDRNKP | |
| | AAAAGAGGACAGACTTGCGTCGTG | | FKFMLGKQEVIRGVVEEGVAQMS | |
| | CATTATACTGGAATGCTGGAAGAC | | VGQRAKLTISPDYAYGATGHPGII | |
| | GGCAAGAAGGTGGACAGCAGCCG | | PPHATLVFDVELLKLE | |
| | GGACCGAAACAAGCCCTTCAAGTT | | | |
| | CATGCTGGGGAAGCAGGAAGTGAT | | | |
| | CCGGGGCTGGGAGGAAGGAGTCG | | | |
| | CACAGATGTCAGTGGGACAGAGG | | | |
| | GCCAAACTGACTATTAGCCCAGAC | | | |
| | TACGCTTATGGAGCAACCGGCCAC | | | |
| | CCCGGGATCATTCCCCCTCATGCT | | | |
| | ACACTGGTCTTCGATGTGGAGCTG | | | |
| | CTGAAGCTGGAA | | | |
| Linker | TCAGGCGGTGGCTCAGGTGTGGA | 2206 | SGGGSGVD | 2207 |
| | C | | | |
| Δcaspase9 | GGATTTGGTGATGTCGGTGCTCTT | 2208 | GFGDVGALESLRGNADLAYILSM | 2209 |
| | GAGAGTTTGAGGGGAAATGCAGAT | | EPCGHCLIINNVNFCRESGLRTRT | |
| | TTGGCTTACATCCTGAGCATGGAG | | GSNIDCEKLRRRFSSLHFMVEVK | |
| | CCCTGTGGCCACTGCCTCATTATC | | GDLTAKKMVLALLELARQDHGAL | |
| | AACAATGTGAACTTCTGCCGTGAG | | DCCVVVILSHGCQASHLQFPGAV | |
| | TCCGGGCTCCGCACCCGCACTGG | | YGTDGCPVSVEKIVNIFNGTSCPS | |
| | CTCCAACATCGACTGTGAGAAGTT | | LGGKPKLFFIQACGGEQKDHGFE | |
| | GCGGCGTCGCTTCTCCTCGCTGCA | | VASTSPEDESPGSNPEPDATPFQ | |
| | TTTCATGGTGGAGGTGAAGGGCGA | | EGLRTFDQLDAISSLPTPSDIFVS | |
| | CCTGACTGCCAAGAAAATGGTGCT | | YSTFPGFVSVVRDPKSGSVVYVET | |
| | GGCTTTGCTGGAGCTGGCGCgGCA | | LDDIFEQWAHSEDLQSLLLRVAN | |
| | GGACCACGGTGCTCTGGACTGCT | | AVSVKGIYKQMPGCFNFLRKKLF | |
| | GCGTGGTGGTCATTCTCTCTCACG | | FKTSASRA | |
| | GCTGTCAGGCCAGCCACCTGCAGT | | | |
| | TCCCAGGGGCTGTCTACGGCACA | | | |
| | GATGGATGCCCTGTGTCGGTCGAG | | | |
| | AAGATTGTGAACATCTTCAATGGG | | | |
| | ACCAGCTGCCCCAGCCTGGGAGG | | | |
| | GAAGCCCAAGCTCTTTTTCATCCA | | | |
| | GGCCTGTGGTGGGGAGCAGAAAG | | | |
| | AtCATGGGTTTGAGGTGGCCTCCA | | | |
| | CTTCCCCTGAAGACGAGTCCCCTG | | | |
| | GCAGTAACCCCGAGCCAGATGCCA | | | |
| | CCCCGTTCCAGGAAGGTTTGAGGA | | | |
| | CCTTCGACCAGCTGGACGCCATAT | | | |
| | CTAGTTTGCCCACACCCAGTGACA | | | |
| | TCTTTGTGTCCTACTCTACTTTCCC | | | |
| | AGGTTTTGTTTCCTGGAGGGACCC | | | |
| | CAAGAGTGGCTCCTGGTACGTTGA | | | |
| | GACCCTGGACGACATCTTTGAGCA | | | |
| | GTGGGCTCACTCTGAAGACCTGCA | | | |
| | GTCCCTCCTGCTTAGGGTCGCTAA | | | |
| | TGCTGTTTCGGTGAAAGGGATTTA | | | |
| | TAAACAGATGCCTGGTTGCTTTAAT | | | |
| | TTCCTCCGGAAAAAACTTTTCTTTA | | | |
| | AAACATCAGCTAGCAGAGCC | | | |
| Linker | ggatctggaccgcGG | 2210 | GSGPR | 2211 |
| T2A | GAAGGCCGAGGGAGCCTGCTGAC | 2212 | EGRGSLLTCGDVEENPGP | 2213 |
| | ATGTGGCGATGTGGAGGAAAACCC | | | |
| | AGGACCA | | | |
| Linker | CCACGG | 2214 | PR | 2215 |
| Signal | ATGGAGTTTGGACTTTCTTGGTTGT | 2216 | MEFGLSWLFLVAILKGVQCSR | 2217 |
| Peptide | TTTTGGTGGCAATTCTGAAGGGTG | | | |
| | TCCAGTGTAGCAGG | | | |
| PSCA(A11) | GACATCCAACTGACGCAAAGCCCA | 2218 | DIQLTQSPSTLSASMGDRVTITCS | 2219 |
| VL | TCTACACTCAGCGCTAGCATGGGG | | ASSSVRFIHVVYQQKPGKAPKRLI | |
| | GACAGGGTCACAATCACGTGCTCT | | YDTSKLASGVPSRFSGSGSGTDF | |
| | GCCTCAAGTTCCGTTAGGTTTATC | | TLTISSLQPEDFATYYCQQWGSS | |
| | CATTGGTATCAGCAGAAACCTGGA | | PFTFGQGTKVE1K | |
| | AAGGCCCCAAAAAGACTGATCTAT | | | |
| | GATACCAGCAAGCTGGCTTCCGGA | | | |
| | GTGCCCTCAAGGTTCTCAGGATCT | | | |
| | GGCAGTGGGACCGATTTCACCCTG | | | |
| | ACAATTAGCAGCCTTCAGCCAGAG | | | |
| | GATTTCGCAACCTATTACTGTCAGC | | | |
| | AATGGGGGTCCAGCCCATTCACTT | | | |
| | TCGGCCAAGGAACAAAGGTGGAG | | | |
| | ATAAAA | | | |
| Flex | GGCGGAGGAAGCGGAGGTGGGG | 2220 | gggsgggg | 2221 |
| | GC | | | |
| PSCA(A11) | GAGGTGCAGCTCGTGGAGTATGG | 2222 | EVQLVEYGGGLVQPGGSLRLSC | 2223 |
| VH | CGGGGGCCTGGTGCAGCCTGGGG | | AASGFNIKDYYIHVVVRQAPGKGL | |
| | GTAGTCTGAGGCTCTCCTGCGCTG | | EVVVAWIDPENGDTEFVPKFQGR | |
| | CCTCTGGCTTTAACATTAAAGACTA | | ATMSADTSKNTAYLQMNSLRAED | |
| | CTACATACATTGGGTGCGGCAGGC | | TAVYYCKTGGFWGQGTLVTVSS | |
| | CCCAGGCAAAGGGCTCGAATGGG | | | |
| | TGGCCTGGATTGACCCTGAGAATG | | | |
| | GTGACACTGAGTTTGTCCCCAAGT | | | |
| | TTCAGGGCAGAGCCACCATGAGC | | | |
| | GCTGACACAAGCAAAAACACTGCT | | | |
| | TATCTCCAAATGAATAGCCTGCGA | | | |
| | GCTGAAGATACAGCAGTCTATTAC | | | |
| | TGCAAGACGGGAGGATTCTGGGG | | | |
| | CCAGGGAACTCTGGTGACAGTTAG | | | |
| | TTCC | | | |
| Linker | GGATCC | 2224 | gs | 2225 |
| CD34 | GAACTTCCTACTCAGGGGACTTTC | 2226 | ELPTQGTFSNVSTNVS | 2227 |
| epitope | TCAAACGTTAGCACAAACGTAAGT | | | |
| CD3ζ | AGAGTGAAGTTCAGCAGGAGCGCA | 2228 | RVKFSRSADAPAYQQGQNQLYN | 2229 |
| | GACGCCCCCGCGTACCAGCAGGG | | ELNLGRREEYDVLDKRRGRDPE | |
| | CCAGAACCAGCTCTATAACGAGCT | | MGGKPRRKNPQEGLYNELQKDK | |
| | CAATCTAGGACGAAGAGAGGAGTA | | MAEAYSEIGMKGERRRGKGHDG | |
| | CGATGTTTTGGACAAGAGACGTGG | | LYQGLSTATKDTYDALHMQALPP | |
| | CCGGGACCCTGAGATGGGGGGAA | | R | |
| | AGCCGAGAAGGAAGAACCCTCAG | | | |
| | GAAGGCCTGTACAATGAACTGCAG | | | |
| | AAAGATAAGATGGCGGAGGCCTAC | | | |
| | AGTGAGATTGGGATGAAAGGCGAG | | | |
| | CGCCGGAGGGGCAAGGGGCACGA | | | |
| | TGGCCTTTACCAGGGTCTCAGTAC | | | |
| | AGCCACCAAGGACACCTACGACGC | | | |
| | CCTTCACATGCAAGCTCTTCCACC | | | |
| | TCGT | | | |

Appendix 33: pBP1757-pSFG-FRB_{L}.FKBP_{wt}.MC-P2A.FKBPv.ΔC9.T2A-αPSCA.Q.CD8stm.ζ

| | | SEQ | | SEQ ID |
|---|---|---|---|---|
| Fragment | Nucleotide | ID NO: | Peptide | NO: |
| FRB_{L} | ATGTTGGAAATGTGGCATGAAGGG | 2230 | MLEMWHEGLEEASRLYFGERNV | 2231 |
| | TTGGAAGAAGCTTCAAGGCTGTAC | | KGMFEVLEPLHAMMERGPQTLK | |
| | TTCGGAGAGAGGAACGTGAAGGG | | ETSFNQAYGRDLMEAQEWCRKY | |
| | CATGTTTGAGGTTCTTGAACCTCTG | | MKSGNVKDLLQAWDLYYHVFRRI | |
| | CACGCCATGATGGAACGGGGACC | | SK | |
| | GCAGACACTGAAAGAAACCTCTTT | | | |
| | TAATCAGGCCTACGGCAGAGACCT | | | |
| | GATGGAGGCCCAAGAATGGTGTAG | | | |
| | AAAGTATATGAAATCCGGTAACGT | | | |
| | GAAAGACCTGCTCCAGGCCTGGG | | | |
| | ACCTTTATTACCATGTGTTCAGGCG | | | |
| | GATCAGTAAG | | | |
| Linker | gtcgag | 2232 | VE | 2233 |
| FKBP_{WT}′ | GGCGTCCAAGTCGAAACCATTAGT | 2234 | GVQVETISPGDGRTFPKRGQTCV | 2235 |
| | CCCGGCGATGGCAGAACATTTCCT | | VHYTGMLEDGKKFDSSRDRNKP | |
| | ACAAGGGGACAAACATGTGTCGTC | | FKFMLGKQEVIRGVVEEGVAQMS | |
| | CATTATACAGGCATGTTGGAGGAC | | VGQRAKLTISPDYAYGATGHPGII | |
| | GGCAAAAAGTTCGACAGTAGTAGA | | PPHATLVFDVELLKLE | |
| | GATCGCAATAAACCTTTCAAATTCA | | | |
| | TGTTGGGAAAACAAGAAGTCATTA | | | |
| | GGGGATGGGAGGAGGGCGTGGCT | | | |
| | CAAATGTCCGTCGGCCAACGCGCT | | | |
| | AAGCTCACCATCAGCCCCGACTAC | | | |
| | GCATACGGCGCTACCGGACATCCC | | | |
| | GGAATTATTCCCCCTCACGCTACC | | | |
| | TTGGTGTTTGACGTCGAACTGTTG | | | |
| | AAGCTCGAA | | | |
| MyD88 | atggctgcaggaggtcccggcgcggggtctgcgg | 2236 | MAAGGPGAGSAAPVSSTSSLPLA | 2237 |
| | ccccggtctcctccacatcctcccttcccctggctgc | | ALNMRVRRRLSLFLNVRTQVAAD | |
| | tctcaacatgcgagtgcggcgccgcctgtctctgtt | | WTALAEEMDFEYLEIRQLETQAD | |
| | cttgaacgtgcggacacaggtggcggccgactgg | | PTGRLLDAWQGRPGASVGRLLD | |
| | accgcgctggcggaggagatggactttgagtactt | | LLTKLGRDDVLLELGPSIEEDCQK | |
| | ggagatccggcaactggagacacaagcggacc | | YILKQQQEEAEKPLQVAAVDSSV | |
| | ccactggcaggctgctggacgcctggcagggac | | PRTAELAGITTLDDPLGHMPERF | |
| | gccctggcgcctctgtaggccgactgctcgatctgc | | DAFICYCPSDI | |
| | ttaccaagctgggccgcgacgacgtgctgctgga | | | |
| | gctgggacccagcattgaggaggattgccaaaa | | | |
| | gtatatcttgaagcagcagcaggaggaggctgag | | | |
| | aagcctttacaggtggccgctgtagacagcagtgt | | | |
| | cccacggacagcagagctggcgggcatcacca | | | |
| | cacttgatgaccccctggggcatatgcctgagcgtt | | | |
| | tcgatgccttcatctgctattgccccagcgacatc | | | |
| Linker | gtcgag | 2238 | VE | 2239 |
| CD40 | aaaaaggtggccaagaagccaaccaataaggc | 2240 | KKVAKKPTNKAPHPKQEPQEINF | 2241 |
| | cccccaccccaagcaggagccccaggagatca | | PDDLPGSNTAAPVQETLHGCQP | |
| | attttcccgacgatcttcctggctccaacactgctgct | | VTQEDGKESRISVQERQ | |
| | ccagtgcaggagactttacatggatgccaaccggt | | | |
| | cacccaggaggatggcaaagagagtcgcatctc | | | |
| | agtgcaggagagacag | | | |
| Linker | ggatctgga | 2242 | GSG | 2243 |
| P2A | GCAACGAATTTTTCCCTGCTGAAA | 2244 | ATNFSLLKQAGDVEENPGP | 2245 |
| | CAGGCAGGGGACGTAGAGGAAAA | | | |
| | TCCTGGTCCT | | | |
| Linker | atgcatATGCTGGAG | 2246 | MHMLE | 2247 |
| FKBPv | GGAGTGCAGGTGGAGACTATTAGC | 2248 | GVQVETISPGDGRTFPKRGQTCV | 2249 |
| | CCCGGAGATGGCAGAACATTCCCC | | VHYTGMLEDGKKVDSSRDRNKP | |
| | AAAAGAGGACAGACTTGCGTCGTG | | FKFMLGKQEVIRGVVEEGVAQMS | |
| | CATTATACTGGAATGCTGGAAGAC | | VGQRAKLTISPDYAYGATGHPGII | |
| | GGCAAGAAGGTGGACAGCAGCCG | | PPHATLVFDVELLKLE | |
| | GGACCGAAACAAGCCCTTCAAGTT | | | |
| | CATGCTGGGGAAGCAGGAAGTGAT | | | |
| | CCGGGGCTGGGAGGAAGGAGTCG | | | |
| | CACAGATGTCAGTGGGACAGAGG | | | |
| | GCCAAACTGACTATTAGCCCAGAC | | | |
| | TACGCTTATGGAGCAACCGGCCAC | | | |
| | CCCGGGATCATTCCCCCTCATGCT | | | |
| | ACACTGGTCTTCGATGTGGAGCTG | | | |
| | CTGAAGCTGGAA | | | |
| Linker | TCAGGCGGTGGCTCAGGTGTGGA | 2250 | SGGGSGVD | 2251 |
| | C | | | |
| Δcaspase9 | GGATTTGGTGATGTCGGTGCTCTT | 2252 | GFGDVGALESLRGNADLAYILSM | 2253 |
| | GAGAGTTTGAGGGGAAATGCAGAT | | EPCGHCLIINNVNFCRESGLRTRT | |
| | TTGGCTTACATCCTGAGCATGGAG | | GSNIDCEKLRRRFSSLHFMVEVK | |
| | CCCTGTGGCCACTGCCTCATTATC | | GDLTAKKMVLALLELARQDHGAL | |
| | AACAATGTGAACTTCTGCCGTGAG | | DCCVVVILSHGCQASHLQFPGAV | |
| | TCCGGGCTCCGCACCCGCACTGG | | YGTDGCPVSVEKIVNIFNGTSCPS | |
| | CTCCAACATCGACTGTGAGAAGTT | | LGGKPKLFFIQACGGEQKDHGFE | |
| | GCGGCGTCGCTTCTCCTCGCTGCA | | VASTSPEDESPGSNPEPDATPFQ | |
| | TTTCATGGTGGAGGTGAAGGGCGA | | EGLRTFDQLDAISSLPTPSDIFVS | |
| | CCTGACTGCCAAGAAAATGGTGCT | | YSTFPGFVSVVRDPKSGSVVYVET | |
| | GGCTTTGCTGGAGCTGGCGCgGCA | | LDDIFEQWAHSEDLQSLLLRVAN | |
| | GGACCACGGTGCTCTGGACTGCT | | AVSVKGIYKQMPGCFNFLRKKLF | |
| | GCGTGGTGGTCATTCTCTCTCACG | | FKTSASRA | |
| | GCTGTCAGGCCAGCCACCTGCAGT | | | |
| | TCCCAGGGGCTGTCTACGGCACA | | | |
| | GATGGATGCCCTGTGTCGGTCGAG | | | |
| | AAGATTGTGAACATCTTCAATGGG | | | |
| | ACCAGCTGCCCCAGCCTGGGAGG | | | |
| | GAAGCCCAAGCTCTTTTTCATCCA | | | |
| | GGCCTGTGGTGGGGAGCAGAAAG | | | |
| | AtCATGGGTTTGAGGTGGCCTCCA | | | |
| | CTTCCCCTGAAGACGAGTCCCCTG | | | |
| | GCAGTAACCCCGAGCCAGATGCCA | | | |
| | CCCCGTTCCAGGAAGGTTTGAGGA | | | |
| | CCTTCGACCAGCTGGACGCCATAT | | | |
| | CTAGTTTGCCCACACCCAGTGACA | | | |
| | TCTTTGTGTCCTACTCTACTTTCCC | | | |
| | AGGTTTTGTTTCCTGGAGGGACCC | | | |
| | CAAGAGTGGCTCCTGGTACGTTGA | | | |
| | GACCCTGGACGACATCTTTGAGCA | | | |
| | GTGGGCTCACTCTGAAGACCTGCA | | | |
| | GTCCCTCCTGCTTAGGGTCGCTAA | | | |
| | TGCTGTTTCGGTGAAAGGGATTTA | | | |
| | TAAACAGATGCCTGGTTGCTTTAAT | | | |
| | TTCCTCCGGAAAAAACTTTTCTTTA | | | |
| | AAACATCAGCTAGCAGAGCC | | | |
| Linker | ggatctggaccgcGG | 2254 | GSGPR | 2255 |
| T2A | GAAGGCCGAGGGAGCCTGCTGAC | 2256 | EGRGSLLTCGDVEENPGP | 2257 |
| | ATGTGGCGATGTGGAGGAAAACCC | | | |
| | AGGACCA | | | |
| Linker | CCACGG | 2258 | PR | 2259 |
| Signal | ATGGAGTTTGGACTTTCTTGGTTGT | 2260 | MEFGLSWLFLVAILKGVQCSR | 2261 |
| Peptide | TTTTGGTGGCAATTCTGAAGGGTG | | | |
| | TCCAGTGTAGCAGG | | | |
| PSCA(A11) | GACATCCAACTGACGCAAAGCCCA | 2262 | DIQLTQSPSTLSASMGDRVTITCS | 2263 |
| VL | TCTACACTCAGCGCTAGCATGGGG | | ASSSVRFIHVVYQQKPGKAPKRLI | |
| | GACAGGGTCACAATCACGTGCTCT | | YDTSKLASGVPSRFSGSGSGTDF | |
| | GCCTCAAGTTCCGTTAGGTTTATC | | TLTISSLQPEDFATYYCQQWGSS | |
| | CATTGGTATCAGCAGAAACCTGGA | | PFTFGQGTKVEIK | |
| | AAGGCCCCAAAAAGACTGATCTAT | | | |
| | GATACCAGCAAGCTGGCTTCCGGA | | | |
| | GTGCCCTCAAGGTTCTCAGGATCT | | | |
| | GGCAGTGGGACCGATTTCACCCTG | | | |
| | ACAATTAGCAGCCTTCAGCCAGAG | | | |
| | GATTTCGCAACCTATTACTGTCAGC | | | |
| | AATGGGGGTCCAGCCCATTCACTT | | | |
| | TCGGCCAAGGAACAAAGGTGGAG | | | |
| | ATAAAA | | | |
| Flex | GGCGGAGGAAGCGGAGGTGGGG | 2264 | gggsgggg | 2265 |
| | GC | | | |
| PSCA(A11) | GAGGTGCAGCTCGTGGAGTATGG | 2266 | EVQLVEYGGGLVQPGGSLRLSC | 2267 |
| VH | CGGGGGCCTGGTGCAGCCTGGGG | | AASGFNIKDYYIHVVVRQAPGKGL | |
| | GTAGTCTGAGGCTCTCCTGCGCTG | | EVVVAWIDPENGDTEFVPKFQGR | |
| | CCTCTGGCTTTAACATTAAAGACTA | | ATMSADTSKNTAYLQMNSLRAED | |
| | CTACATACATTGGGTGCGGCAGGC | | TAVYYCKTGGFWGQGTLVTVSS | |
| | CCCAGGCAAAGGGCTCGAATGGG | | | |
| | TGGCCTGGATTGACCCTGAGAATG | | | |
| | GTGACACTGAGTTTGTCCCCAAGT | | | |
| | TTCAGGGCAGAGCCACCATGAGC | | | |
| | GCTGACACAAGCAAAAACACTGCT | | | |
| | TATCTCCAAATGAATAGCCTGCGA | | | |
| | GCTGAAGATACAGCAGTCTATTAC | | | |
| | TGCAAGACGGGAGGATTCTGGGG | | | |
| | CCAGGGAACTCTGGTGACAGTTAG | | | |
| | TTCC | | | |
| Linker | GGATCC | 2268 | gs | 2269 |
| CD34 | GAACTTCCTACTCAGGGGACTTTC | 2270 | ELPTQGTFSNVSTNVS | 2271 |
| epitope | TCAAACGTTAGCACAAACGTAAGT | | | |
| CD3ζ | AGAGTGAAGTTCAGCAGGAGCGCA | 2272 | RVKFSRSADAPAYQQGQNQLYN | 2273 |
| | GACGCCCCCGCGTACCAGCAGGG | | ELNLGRREEYDVLDKRRGRDPE | |
| | CCAGAACCAGCTCTATAACGAGCT | | MGGKPRRKNPQEGLYNELQKDK | |
| | CAATCTAGGACGAAGAGAGGAGTA | | MAEAYSEIGMKGERRRGKGHDG | |
| | CGATGTTTTGGACAAGAGACGTGG | | LYQGLSTATKDTYDALHMQALPP | |
| | CCGGGACCCTGAGATGGGGGGAA | | R | |
| | AGCCGAGAAGGAAGAACCCTCAG | | | |
| | GAAGGCCTGTACAATGAACTGCAG | | | |
| | AAAGATAAGATGGCGGAGGCCTAC | | | |
| | AGTGAGATTGGGATGAAAGGCGAG | | | |
| | CGCCGGAGGGGCAAGGGGCACGA | | | |
| | TGGCCTTTACCAGGGTCTCAGTAC | | | |
| | AGCCACCAAGGACACCTACGACGC | | | |
| | CCTTCACATGCAAGCTCTTCCACC | | | |
| | TCGT | | | |

Appendix 34: pBP1759-pSFG-FRB_{L}.FKBP_{wt}.MC-P2A.FKBPv.ΔC9.T2A-αHER2.Q.CD8stm.ζ

| | | Seq ID | | Seq ID |
|---|---|---|---|---|
| Fragment | Nucleotide | No: | Peptide | No: |
| FRB_{L} | ATGTTGGAAATGTGGCATGAAGGGTTG | 2274 | MLEMWHEGLEEASRLYFGER | 2275 |
| | GAAGAAGCTTCAAGGCTGTACTTCGGA | | NVKGMFEVLEPLHAMMERGP | |
| | GAGAGGAACGTGAAGGGCATGTTTGAG | | QTLKETSFNQAYGRDLMEAQ | |
| | GTTCTTGAACCTCTGCACGCCATGATGG | | EWCRKYMKSGNVKDLLQAW | |
| | AACGGGGACCGCAGACACTGAAAGAAA | | DLYYHVFRRISK | |
| | CCTCTTTTAATCAGGCCTACGGCAGAGA | | | |
| | CCTGATGGAGGCCCAAGAATGGTGTAG | | | |
| | AAAGTATATGAAATCCGGTAACGTGAAA | | | |
| | GACCTGCTCCAGGCCTGGGACCTTTATT | | | |
| | ACCATGTGTTCAGGCGGATCAGTAAG | | | |
| Linker | gtcgag | 2276 | VE | 2277 |
| FKBP_{WT}′ | GGCGTCCAAGTCGAAACCATTAGTCCC | 2278 | GVQVETISPGDGRTFPKRGQ | 2279 |
| | GGCGATGGCAGAACATTTCCTACAAGG | | TCVVHYTGMLEDGKKFDSSR | |
| | GGACAAACATGTGTCGTCCATTATACAG | | DRNKPFKFMLGKQEVIRGWE | |
| | GCATGTTGGAGGACGGCAAAAAGTTCG | | EGVAQMSVGQRAKLTISPDYA | |
| | ACAGTAGTAGAGATCGCAATAAACCTTT | | YGATGHPGIIPPHATLVFDVEL | |
| | CAAATTCATGTTGGGAAAACAAGAAGTC | | LKLE | |
| | ATTAGGGGATGGGAGGAGGGCGTGGCT | | | |
| | CAAATGTCCGTCGGCCAACGCGCTAAG | | | |
| | CTCACCATCAGCCCCGACTACGCATAC | | | |
| | GGCGCTACCGGACATCCCGGAATTATT | | | |
| | CCCCCTCACGCTACCTTGGTGTTTGACG | | | |
| | TCGAACTGTTGAAGCTCGAA | | | |
| MyD88 | atggctgcaggaggtcccggcgcggggtctgcggccccggt | 2280 | MAAGGPGAGSAAPVSSTSSL | 2281 |
| | ctcctccacatcctcccttcccctggctgctctcaacatg | | PLAALNMRVRRRLSLFLNVRT | |
| | cgagtgcggcgccgcctgtctctgttcttgaacgtgcggac | | QVAADWTALAEEMDFEYLEIR | |
| | acaggtggcggccgactggaccgcgctggcggaggag | | QLETQADPTGRLLDAWQGRP | |
| | atggactttgagtacttggagatccggcaactggagacac | | GASVGRLLDLLTKLGRDDVLL | |
| | aagcggaccccactggcaggctgctggacgcctggcag | | ELGPSIEEDCQKYILKQQQEE | |
| | ggacgccctggcgcctctgtaggccgactgctcgatctgct | | AEKPLQVAAVDSSVPRTAELA | |
| | taccaagctgggccgcgacgacgtgctgctggagctggg | | GITTLDDPLGHMPERFDAFICY | |
| | acccagcattgaggaggattgccaaaagtatatcttgaag | | CPSDI | |
| | cagcagcaggaggaggctgagaagcctttacaggtggc | | | |
| | cgctgtagacagcagtgtcccacggacagcagagctgg | | | |
| | cgggcatcaccacacttgatgaccccctggggcatatgcc | | | |
| | tgagcgtttcgatgccttcatctgctattgccccagcgacatc | | | |
| Linker | gtcgag | 2282 | VE | 2283 |
| CD40 | aaaaaggtggccaagaagccaaccaataaggcccccc | 2284 | KKVAKKPTNKAPHPKQEPQEI | 2285 |
| | accccaagcaggagccccaggagatcaattttcccgacg | | NFPDDLPGSNTAAPVQETLH | |
| | atcttcctggctccaacactgctgctccagtgcaggagactt | | GCQPVTQEDGKESRISVQER | |
| | tacatggatgccaaccggtcacccaggaggatggcaaa | | Q | |
| | gagagtcgcatctcagtgcaggagagacag | | | |
| Linker | ggatctgga | 2286 | GSG | 2287 |
| P2A | GCAACGAATTTTTCCCTGCTGAAACAGG | 2288 | ATNFSLLKQAGDVEENPGP | 2289 |
| | CAGGGGACGTAGAGGAAAATCCTGGTC | | | |
| | CT | | | |
| Linker | atgcatATGCTGGAG | 2290 | MHMLE | 2291 |
| FKBPv | GGAGTGCAGGTGGAGACTATTAGCCCC | 2292 | GVQVETISPGDGRTFPKRGQ | 2293 |
| | GGAGATGGCAGAACATTCCCCAAAAGA | | TCVVHYTGMLEDGKKVDSSR | |
| | GGACAGACTTGCGTCGTGCATTATACTG | | DRNKPFKFMLGKQEVIRGWE | |
| | GAATGCTGGAAGACGGCAAGAAGGTGG | | EGVAQMSVGQRAKLTISPDYA | |
| | ACAGCAGCCGGGACCGAAACAAGCCCT | | YGATGHPGIIPPHATLVFDVEL | |
| | TCAAGTTCATGCTGGGGAAGCAGGAAG | | LKLE | |
| | TGATCCGGGGCTGGGAGGAAGGAGTCG | | | |
| | CACAGATGTCAGTGGGACAGAGGGCCA | | | |
| | AACTGACTATTAGCCCAGACTACGCTTA | | | |
| | TGGAGCAACCGGCCACCCCGGGATCAT | | | |
| | TCCCCCTCATGCTACACTGGTCTTCGAT | | | |
| | GTGGAGCTGCTGAAGCTGGAA | | | |
| Linker | TCAGGCGGTGGCTCAGGTGTGGAC | 2294 | SGGGSGVD | 2295 |
| Δcaspase9 | GGATTTGGTGATGTCGGTGCTCTTGAGA | 2296 | GFGDVGALESLRGNADLAYIL | 2297 |
| | GTTTGAGGGGAAATGCAGATTTGGCTTA | | SMEPCGHCLIINNVNFCRESG | |
| | CATCCTGAGCATGGAGCCCTGTGGCCA | | LRTRTGSNIDCEKLRRRFSSL | |
| | CTGCCTCATTATCAACAATGTGAACTTCT | | HFMVEVKGDLTAKKMVLALLE | |
| | GCCGTGAGTCCGGGCTCCGCACCCGCA | | LARQDHGALDCCVVVILSHGC | |
| | CTGGCTCCAACATCGACTGTGAGAAGTT | | QASHLQFPGAVYGTDGCPVS | |
| | GCGGCGTCGCTTCTCCTCGCTGCATTTC | | VEKIVNIFNGTSCPSLGGKPKL | |
| | ATGGTGGAGGTGAAGGGCGACCTGACT | | FFIQACGGEQKDHGFEVASTS | |
| | GCCAAGAAAATGGTGCTGGCTTTGCTG | | PEDESPGSNPEPDATPFQEG | |
| | GAGCTGGCGCgGCAGGACCACGGTGCT | | LRTFDQLDAISSLPTPSDIFVS | |
| | CTGGACTGCTGCGTGGTGGTCATTCTCT | | YSTFPGFVSVVRDPKSGSVVYV | |
| | CTCACGGCTGTCAGGCCAGCCACCTGC | | ETLDDIFEQWAHSEDLQSLLL | |
| | AGTTCCCAGGGGCTGTCTACGGCACAG | | RVANAVSVKGIYKQMPGCFN | |
| | ATGGATGCCCTGTGTCGGTCGAGAAGA | | FLRKKLFFKTSASRA | |
| | TTGTGAACATCTTCAATGGGACCAGCTG | | | |
| | CCCCAGCCTGGGAGGGAAGCCCAAGCT | | | |
| | CTTTTTCATCCAGGCCTGTGGTGGGGA | | | |
| | GCAGAAAGAtCATGGGTTTGAGGTGGCC | | | |
| | TCCACTTCCCCTGAAGACGAGTCCCCTG | | | |
| | GCAGTAACCCCGAGCCAGATGCCACCC | | | |
| | CGTTCCAGGAAGGTTTGAGGACCTTCG | | | |
| | ACCAGCTGGACGCCATATCTAGTTTGCC | | | |
| | CACACCCAGTGACATCTTTGTGTCCTAC | | | |
| | TCTACTTTCCCAGGTTTTGTTTCCTGGA | | | |
| | GGGACCCCAAGAGTGGCTCCTGGTACG | | | |
| | TTGAGACCCTGGACGACATCTTTGAGCA | | | |
| | GTGGGCTCACTCTGAAGACCTGCAGTC | | | |
| | CCTCCTGCTTAGGGTCGCTAATGCTGTT | | | |
| | TCGGTGAAAGGGATTTATAAACAGATGC | | | |
| | CTGGTTGCTTTAATTTCCTCCGGAAAAA | | | |
| | ACTTTTCTTTAAAACATCAGCTAGCAGA | | | |
| | GCC | | | |
| Linker | ggatctggaccgcGG | 2298 | GSGPR | 2299 |
| T2A | GAAGGCCGAGGGAGCCTGCTGACATGT | 2300 | EGRGSLLTCGDVEENPGP | 2301 |
| | GGCGATGTGGAGGAAAACCCAGGACCA | | | |
| Linker | GCATGCGCCACC | 2302 | ACAT | 2303 |
| Signal | ATGGAGTTTGGGTTGTCATGGTTGTTTC | 2304 | MEFGLSWLFLVAILKGVQCSR | 2305 |
| Peptide | TCGTCGCTATTCTCAAAGGTGTACAATG | | | |
| | CTCCCGC | | | |
| HER2(FRP5) | GAAGTCCAATTGCAACAGTCAGGCCCC | 2306 | EVQLQQSGPELKKPGETVKIS | 2307 |
| VH | GAATTGAAAAAGCCCGGCGAAACAGTG | | CKASGYPFTNYGMNVVVKQAP | |
| | AAGATATCTTGTAAAGCCTCCGGTTACC | | GQGLKWMGWINTSTGESTFA | |
| | CTTTTACGAACTATGGAATGAACTGGGT | | DDFKGRFDFSLETSANTAYLQ | |
| | CAAACAAGCCCCTGGACAGGGATTGAA | | INNLKSEDMATYFCARVVEVYH | |
| | GTGGATGGGATGGATCAATACATCAACA | | GYVPYWGQGTTVTVSS | |
| | GGCGAGTCTACCTTCGCAGATGATTTCA | | | |
| | AAGGTCGCTTTGACTTCTCACTGGAGAC | | | |
| | CAGTGCAAATACCGCCTACCTTCAGATT | | | |
| | AACAATCTTAAAAGCGAGGATATGGCAA | | | |
| | CCTACTTTTGCGCAAGATGGGAAGTTTA | | | |
| | TCACGGGTACGTGCCATACTGGGGACA | | | |
| | AGGAACGACAGTGACAGTTAGTAGC | | | |
| Flex | GGCGGTGGAGGCTCCGGTGGAGGCGG | 2308 | GGGGSGGGGSGGGGS | 2309 |
| | CTCTGGAGGAGGAGGTTCA | | | |
| HER2(FRP5) | GACATCCAATTGACACAATCACACAAAT | 2310 | EVQLVEYGGGLVQPGGSLRL | 2311 |
| VL | TTCTCTCAACTTCTGTAGGAGACAGAGT | | SCAASGFNIKDYYIHVVVRQAP | |
| | GAGCATAACCTGCAAAGCATCCCAGGA | | GKGLEWVAWIDPENGDTEFV | |
| | CGTGTACAATGCTGTGGCTTGGTACCAA | | PKFQGRATMSADTSKNTAYL | |
| | CAGAAGCCTGGACAATCCCCAAAATTGC | | QMNSLRAEDTAVYYCKTGGF | |
| | TGATTTATTCTGCCTCTAGTAGGTACACT | | WGQGTLVTVSS | |
| | GGGGTACCTTCTCGGTTTACGGGCTCT | | | |
| | GGGTCCGGACCAGATTTCACGTTCACAA | | | |
| | TCAGTTCCGTTCAAGCTGAAGACCTCGC | | | |
| | TGTTTATTTTTGCCAGCAGCACTTCCGA | | | |
| | ACCCCTTTTACTTTTGGCTCAGGCACTA | | | |
| | AGTTGGAAATCAAGGCTTTG | | | |
| Linker | atgcat | 2312 | MH | 2313 |
| CD34 | GAACTTCCTACTCAGGGGACTTTCTCAA | 2314 | ELPTQGTFSNVSTNVS | 2315 |
| epitope | ACGTTAGCACAAACGTAAGT | | | |
| CD3ζ | AGAGTGAAGTTCAGCAGGAGCGCAGAC | 2316 | RVKFSRSADAPAYQQGQNQL | 2317 |
| | GCCCCCGCGTACCAGCAGGGCCAGAAC | | YNELNLGRREEYDVLDKRRG | |
| | CAGCTCTATAACGAGCTCAATCTAGGAC | | RDPEMGGKPRRKNPQEGLYN | |
| | GAAGAGAGGAGTACGATGTTTTGGACAA | | ELQKDKMAEAYSEIGMKGER | |
| | GAGACGTGGCCGGGACCCTGAGATGG | | RRGKGHDGLYQGLSTATKDT | |
| | GGGGAAAGCCGAGAAGGAAGAACCCTC | | YDALHMQALPPR | |
| | AGGAAGGCCTGTACAATGAACTGCAGA | | | |
| | AAGATAAGATGGCGGAGGCCTACAGTG | | | |
| | AGATTGGGATGAAAGGCGAGCGCCGGA | | | |
| | GGGGCAAGGGGCACGATGGCCTTTACC | | | |
| | AGGGTCTCAGTACAGCCACCAAGGACA | | | |
| | CCTACGACGCCCTTCACATGCAAGCTCT | | | |
| | TCCACCTCGT | | | |

Appendix 35: pBP1796-pSFG-FKBP_{wt}.FRB_{L}-MC. P2A.FKBPv.ΔC9.T2A-αPSCA.Q.CD8stm.ζ

| | | Seq | | Seq |
|---|---|---|---|---|
| | | ID | | ID |
| Fragment | Nucleotide | No: | Peptide | No: |
| FKBP_{WT}′ | atgGGCGTCCAAGTCGAAACCATTAGTC | 2318 | MGVQVETISPGDGRTFPKRG | 2319 |
| | CCGGCGATGGCAGAACATTTCCTACAA | | QTCVVHYTGMLEDGKKFDSS | |
| | GGGGACAAACATGTGTCGTCCATTATAC | | RDRNKPFKFMLGKQEVIRGW | |
| | AGGCATGTTGGAGGACGGCAAAAAGTT | | EEGVAQMSVGQRAKLTISPDY | |
| | CGACAGTAGTAGAGATCGCAATAAACCT | | AYGATGHPGIIPPHATLVFDVE | |
| | TTCAAATTCATGTTGGGAAAACAAGAAG | | LLKLE | |
| | TCATTAGGGGATGGGAGGAGGGCGTGG | | | |
| | CTCAAATGTCCGTCGGCCAACGCGCTA | | | |
| | AGCTCACCATCAGCCCCGACTACGCAT | | | |
| | ACGGCGCTACCGGACATCCCGGAATTA | | | |
| | TTCCCCCTCACGCTACCTTGGTGTTTGA | | | |
| | CGTCGAACTGTTGAAGCTCGAA | | | |
| Linker | GGATCAGGCGGTGGCAGCGGCCAATTG | 2320 | gSGGGSGel | 2321 |
| FRB_{L} | ATGTTGGAAATGTGGCATGAAGGGTTG | 2322 | MLEMVVHEGLEEASRLYFGER | 2323 |
| | GAAGAAGCTTCAAGGCTGTACTTCGGA | | NVKGMFEVLEPLHAMMERGP | |
| | GAGAGGAACGTGAAGGGCATGTTTGAG | | QTLKETSFNQAYGRDLMEAQ | |
| | GTTCTTGAACCTCTGCACGCCATGATGG | | EWCRKYMKSGNVKDLLQAW | |
| | AACGGGGACCGCAGACACTGAAAGAAA | | DLYYHVFRRISK | |
| | CCTCTTTTAATCAGGCCTACGGCAGAGA | | | |
| | CCTGATGGAGGCCCAAGAATGGTGTAG | | | |
| | AAAGTATATGAAATCCGGTAACGTGAAA | | | |
| | GACCTGCTCCAGGCCTGGGACCTTTATT | | | |
| | ACCATGTGTTCAGGCGGATCAGTAAG | | | |
| Linker | ggcagtggaGGCGGG | 2324 | Gsgggm | 2325 |
| MyD88 | atggctgcaggaggtcccggcgcggggtctgcggcccc | 2326 | MAAGGPGAGSAAPVSSTSSL | 2327 |
| | ggtctcctccacatcctcccttcccctggctgctctcaacatg | | PLAALNMRVRRRLSLFLNVRT | |
| | cgagtgcggcgccgcctgtctctgttcttgaacgtgcggac | | QVAADWTALAEEMDFEYLEIR | |
| | acaggtggcggccgactggaccgcgctggcggaggag | | QLETQADPTGRLLDAWQGRP | |
| | atggactttgagtacttggagatccggcaactggagacac | | GASVGRLLDLLTKLGRDDVLL | |
| | aagcggaccccactggcaggctgctggacgcctggcag | | ELGPSIEEDCQKYILKQQQEE | |
| | ggacgccctggcgcctctgtaggccgactgctcgatctgct | | AEKPLQVAAVDSSVPRTAELA | |
| | taccaagctgggccgcgacgacgtgctgctggagctggg | | GITTLDDPLGHMPERFDAFICY | |
| | acccagcattgaggaggattgccaaaagtatatcttgaag | | CPSDI | |
| | cagcagcaggaggaggctgagaagcctttacaggtggc | | | |
| | cgctgtagacagcagtgtcccacggacagcagagctgg | | | |
| | cgggcatcaccacacttgatgaccccctggggcatatgcc | | | |
| | tgagcgtttcgatgccttcatctgctattgccccagcgacatc | | | |
| Linker | gtcgag | 2328 | VE | 2329 |
| CD40 | aaaaaggtggccaagaagccaaccaataaggcccccc | 2330 | KKVAKKPTNKAPHPKQEPQEI | 2331 |
| | accccaagcaggagccccaggagatcaattttcccgacg | | NFPDDLPGSNTAAPVQETLH | |
| | atcttcctggctccaacactgctgctccagtgcaggagactt | | GCQPVTQEDGKESRISVQER | |
| | tacatggatgccaaccggtcacccaggaggatggcaaa | | Q | |
| | gagagtcgcatctcagtgcaggagagacag | | | |
| Linker | ggatctgga | 2332 | GSG | 2333 |
| P2A | GCAACGAATTTTTCCCTGCTGAAACAGG | 2334 | ATNFSLLKQAGDVEENPGP | 2335 |
| | CAGGGGACGTAGAGGAAAATCCTGGTC | | | |
| | CT | | | |
| Linker | atgcatATGCTGGAG | 2336 | MHMLE | 2337 |
| FKBPv | GGAGTGCAGGTGGAGACTATTAGCCCC | 2338 | GVQVETISPGDGRTFPKRGQ | 2339 |
| | GGAGATGGCAGAACATTCCCCAAAAGA | | TCVVHYTGMLEDGKKVDSSR | |
| | GGACAGACTTGCGTCGTGCATTATACTG | | DRNKPFKFMLGKQEVIRGVVE | |
| | GAATGCTGGAAGACGGCAAGAAGGTGG | | EGVAQMSVGQRAKLTISPDYA | |
| | ACAGCAGCCGGGACCGAAACAAGCCCT | | YGATGHPGIIPPHATLVFDVEL | |
| | TCAAGTTCATGCTGGGGAAGCAGGAAG | | LKLE | |
| | TGATCCGGGGCTGGGAGGAAGGAGTC | | | |
| | GCACAGATGTCAGTGGGACAGAGGGCC | | | |
| | AAACTGACTATTAGCCCAGACTACGCTT | | | |
| | ATGGAGCAACCGGCCACCCCGGGATCA | | | |
| | TTCCCCCTCATGCTACACTGGTCTTCGA | | | |
| | TGTGGAGCTGCTGAAGCTGGAA | | | |
| Linker | TCAGGCGGTGGCTCAGGTGTGGAC | 2340 | SGGGSGVD | 2341 |
| Δcaspase9 | GGATTTGGTGATGTCGGTGCTCTTGAGA | 2342 | GFGDVGALESLRGNADLAYIL | 2343 |
| | GTTTGAGGGGAAATGCAGATTTGGCTTA | | SMEPCGHCLIINNVNFCRESG | |
| | CATCCTGAGCATGGAGCCCTGTGGCCA | | LRTRTGSNIDCEKLRRRFSSL | |
| | CTGCCTCATTATCAACAATGTGAACTTCT | | HFMVEVKGDLTAKKMVLALLE | |
| | GCCGTGAGTCCGGGCTCCGCACCCGCA | | LARQDHGALDCCVVVILSHGC | |
| | CTGGCTCCAACATCGACTGTGAGAAGTT | | QASHLQFPGAVYGTDGCPVS | |
| | GCGGCGTCGCTTCTCCTCGCTGCATTTC | | VEKIVNIFNGTSCPSLGGKPKL | |
| | ATGGTGGAGGTGAAGGGCGACCTGACT | | FFIQACGGEQKDHGFEVASTS | |
| | GCCAAGAAAATGGTGCTGGCTTTGCTG | | PEDESPGSNPEPDATPFQEG | |
| | GAGCTGGCGCgGCAGGACCACGGTGCT | | LRTFDQLDAISSLPTPSDIFVS | |
| | CTGGACTGCTGCGTGGTGGTCATTCTCT | | YSTFPGFVSVVRDPKSGSVVYV | |
| | CTCACGGCTGTCAGGCCAGCCACCTGC | | ETLDDIFEQWAHSEDLQSLLL | |
| | AGTTCCCAGGGGCTGTCTACGGCACAG | | RVANAVSVKGIYKQMPGCFN | |
| | ATGGATGCCCTGTGTCGGTCGAGAAGA | | FLRKKLFFKTSASRA | |
| | TTGTGAACATCTTCAATGGGACCAGCTG | | | |
| | CCCCAGCCTGGGAGGGAAGCCCAAGCT | | | |
| | CTTTTTCATCCAGGCCTGTGGTGGGGA | | | |
| | GCAGAAAGAtCATGGGTTTGAGGTGGCC | | | |
| | TCCACTTCCCCTGAAGACGAGTCCCCTG | | | |
| | GCAGTAACCCCGAGCCAGATGCCACCC | | | |
| | CGTTCCAGGAAGGTTTGAGGACCTTCG | | | |
| | ACCAGCTGGACGCCATATCTAGTTTGCC | | | |
| | CACACCCAGTGACATCTTTGTGTCCTAC | | | |
| | TCTACTTTCCCAGGTTTTGTTTCCTGGA | | | |
| | GGGACCCCAAGAGTGGCTCCTGGTACG | | | |
| | TTGAGACCCTGGACGACATCTTTGAGCA | | | |
| | GTGGGCTCACTCTGAAGACCTGCAGTC | | | |
| | CCTCCTGCTTAGGGTCGCTAATGCTGTT | | | |
| | TCGGTGAAAGGGATTTATAAACAGATGC | | | |
| | CTGGTTGCTTTAATTTCCTCCGGAAAAA | | | |
| | ACTTTTCTTTAAAACATCAGCTAGCAGA | | | |
| | GCC | | | |
| Linker | ggatctggaccgcGG | 2344 | GSGPR | 2345 |
| T2A | GAAGGCCGAGGGAGCCTGCTGACATGT | 2346 | EGRGSLLTCGDVEENPGP | 2347 |
| | GGCGATGTGGAGGAAAACCCAGGACCA | | | |
| Linker | CCACGG | 2348 | PR | 2349 |
| Signal | ATGGAGTTTGGACTTTCTTGGTTGTTTTT | 2350 | MEFGLSWLFLVAILKGVQCSR | 2351 |
| Peptide | GGTGGCAATTCTGAAGGGTGTCCAGTG | | | |
| | TAGCAGG | | | |
| PSCA(A11) | GACATCCAACTGACGCAAAGCCCATCTA | 2352 | DIQLTQSPSTLSASMGDRVTIT | 2353 |
| VL | CACTCAGCGCTAGCATGGGGGACAGGG | | CSASSSVRFIHVVYQQKPGKA | |
| | TCACAATCACGTGCTCTGCCTCAAGTTC | | PKRLIYDTSKLASGVPSRFSG | |
| | CGTTAGGTTTATCCATTGGTATCAGCAG | | SGSGTDFTLTISSLQPEDFATY | |
| | AAACCTGGAAAGGCCCCAAAAAGACTG | | YCQQWGSSPFTFGQGTKVEI | |
| | ATCTATGATACCAGCAAGCTGGCTTCCG | | K | |
| | GAGTGCCCTCAAGGTTCTCAGGATCTG | | | |
| | GCAGTGGGACCGATTTCACCCTGACAA | | | |
| | TTAGCAGCCTTCAGCCAGAGGATTTCGC | | | |
| | AACCTATTACTGTCAGCAATGGGGGTCC | | | |
| | AGCCCATTCACTTTCGGCCAAGGAACAA | | | |
| | AGGTGGAGATAAAA | | | |
| Flex | GGCGGAGGAAGCGGAGGTGGGGGC | 2354 | gggsgggg | 2355 |
| PSCA(A11) | GAGGTGCAGCTCGTGGAGTATGGCGGG | 2356 | EVQLVEYGGGLVQPGGSLRL | 2357 |
| VH | GGCCTGGTGCAGCCTGGGGGTAGTCTG | | SCAASGFNIKDYYIHVVVRQAP | |
| | AGGCTCTCCTGCGCTGCCTCTGGCTTTA | | GKGLEVVVAWIDPENGDTEFV | |
| | ACATTAAAGACTACTACATACATTGGGT | | PKFQGRATMSADTSKNTAYL | |
| | GCGGCAGGCCCCAGGCAAAGGGCTCG | | QMNSLRAEDTAVYYCKTGGF | |
| | AATGGGTGGCCTGGATTGACCCTGAGA | | WGQGTLVTVSS | |
| | ATGGTGACACTGAGTTTGTCCCCAAGTT | | | |
| | TCAGGGCAGAGCCACCATGAGCGCTGA | | | |
| | CACAAGCAAAAACACTGCTTATCTCCAA | | | |
| | ATGAATAGCCTGCGAGCTGAAGATACA | | | |
| | GCAGTCTATTACTGCAAGACGGGAGGA | | | |
| | TTCTGGGGCCAGGGAACTCTGGTGACA | | | |
| | GTTAGTTCC | | | |
| Linker | GGATCC | 2358 | gs | 2359 |
| CD34 | GAACTTCCTACTCAGGGGACTTTCTCAA | 2360 | ELPTQGTFSNVSTNVS | 2361 |
| epitope | ACGTTAGCACAAACGTAAGT | | | |
| CD3ζ | AGAGTGAAGTTCAGCAGGAGCGCAGAC | 2362 | RVKFSRSADAPAYQQGQNQL | 2363 |
| | GCCCCCGCGTACCAGCAGGGCCAGAAC | | YNELNLGRREEYDVLDKRRG | |
| | CAGCTCTATAACGAGCTCAATCTAGGAC | | RDPEMGGKPRRKNPQEGLYN | |
| | GAAGAGAGGAGTACGATGTTTTGGACA | | ELQKDKMAEAYSEIGMKGER | |
| | AGAGACGTGGCCGGGACCCTGAGATGG | | RRGKGHDGLYQGLSTATKDT | |
| | GGGGAAAGCCGAGAAGGAAGAACCCTC | | YDALHMQALPPR | |
| | AGGAAGGCCTGTACAATGAACTGCAGA | | | |
| | AAGATAAGATGGCGGAGGCCTACAGTG | | | |
| | AGATTGGGATGAAAGGCGAGCGCCGGA | | | |
| | GGGGCAAGGGGCACGATGGCCTTTACC | | | |
| | AGGGTCTCAGTACAGCCACCAAGGACA | | | |
| | CCTACGACGCCCTTCACATGCAAGCTCT | | | |
| | TCCACCTCGT | | | |

### Example 30: Dual Control of Apoptosis

[0887] The present Example provides examples of chimeric pro-apoptotic polypeptides that include dual molecular switches, providing a choice of ligand for activating apoptosis. Chimeric dual-controlled Caspase-9 polypeptides were prepared and assayed for apoptotic activity.

[0888] In this example, in vitro data is provided that compares the apoptotic induction of various Caspase-9 molecular switches in response to rimiducid and rapamycin treatment in 293 and primary human T cells. T cells expressing these three caspase-9 switches when introduced into NSG mice are efficiently eliminated within 24 hours of exposure to their respective activating ligands. Finally, dose titration of the FRB.FKBPᵥ.ΔC9 switch in vivo demonstrated that both rimiducid and rapamycin stimulated efficient removal of T cells with drug concentrations as low as 1 mg/kg.

### Methods

[0889] Peripheral blood mononuclear cells (PBMCs) were isolated from buffy coats obtained through the Gulf Coast Regional Blood Center. Buffy coats tested negative for infectious viral pathogens.

### Activation and Transduction of T Cells

[0890] Production of retrovirus by transient transfection of 293T, and activation of T cells were performed essentially as discussed herein. T cells were transduced with pBP1501, pBP0220, pBP1310, pBP1311, pBP1327, pBP1328 vectors.

### Phenotyping and In Vivo Cell Enumeration

[0891] Transduction efficiency was determined by flow cytometry using anti-CD3-PerCP.Cy5.5 and anti-CD19-APC antibodies. Following mouse sacrifice, total transduced T cell numbers in the spleens were calculated by counting total splenocyte numbers and multiplying by the percentage of CD3⁺CD34⁺ T cells observed by flow cytometry. To examine the phenotype of T cells in mice, spleens were isolated and single-cell suspensions were made by lysing red cells with ammonia chloride/potassium (ACK)-based lysis buffer followed by mechanical dissociation through a 70-μm nylon filter. Cells were subsequently stained with the following antibodies: anti-hCD3-PerCP.Cy5.5, anti-hCD19-APC, and anti-mCD45RA-BV510.

### SRα SEAP Assay in 293 Cells

[0892] On day 0, 5×10⁵ 293 cells were seeded onto 6-well plates in 2 ml DMEM medium (10% FBS+1% pen/strep). On day 1, cells were co-transfected with 1 μg each of pBP1501, pBP0220, pBP1310, pBP1311, pBP1327, pBP1328 vectors and the SRα-SEAP reporter plasmid (pBP0046). On day 2, cells were collected, and seeded onto 96-well plates containing 2× concentrated half-log drug dilutions and also analyzed by FACS for transfection efficiency. On day 3, the drug-treated cells were heat inactivated at 68° C. for 1 hour and supernatants were added to black 96-well plate containing 1 mM MUP substrate (2× concentration) diluted in 2M diethanolamine. The plates were incubated at 37° C. for 30 min and absorbance at 405 nm was measured.

### Western Blot Analysis

[0893] After transduction with the appropriate retrovirus, 6×10⁶ T cells were seeded per well into 6-well plates in 3 ml CTL medium. Twenty-four hours later, cells were collected, washed in cold PBS, and lysed in RIPA Lysis and Extraction Buffer (Thermo, 89901), containing 1× Halt Protease Inhibitor Cocktail (Thermo, 87786) on ice for 30 min in the plated. The lysates were centrifuged at 16,000×g for 20 min at 4° C. and the supernatants were transferred to new Eppendorf tubes. Protein assays were performed using the Pierce BCA Protein Assay Kit (Thermo, 23227) per manufacturer's recommendation. To prepare samples for SDS-PAGE, 50 μg of lysates was mixed with 4× Laemmli Sample Buffer (Bio Rad, 1610747) and heated at 95° C. for 10 min. Meanwhile, 10% SDS gels were prepared using a Bio Rad casting apparatus and 30% Acrylamide/bis Solution (Bio Rad, 160158). The samples were loaded at equal levels of total protein along with Precision Plus Protein Dual Color Standards (Bio Rad, 1610374) and run in 1× Tris/glycine Running Buffer (Bio Rad, 1610771) at 140 V for 90 min. After protein separation, gels were transferred onto PVDF membranes using Program 0 (7 min total) in the iBlot 2 device (Thermo, IB21001). Membranes were subsequently probed with primary and secondary antibodies using the iBind Flex Western Device (Thermo, SLF2000) according to manufacturer's recommendation. Anti-caspase-9 antibody (Thermo, PA1-12506) was used at 1:200 dilution and the secondary HRP-conjugated goat anti-rabbit IgG antibody (Thermo, A16104) was used at 1:500 dilution. The β-actin antibody (Thermo, PA1-16889) was used at 1:1000 dilution and the secondary HRP-conjugated goat anti-rabbit IgG antibody (Thermo, A16104) was used at 1:1000 dilution. The membranes were developed using the SuperSignal West Femto Maximum Sensitivity Substrate Kit (Thermo, 34096) and imaged using the GelLogic 6000 Pro camera and the CareStream MI software (v.5.3.1.16369).

### In Vitro T Cell Caspase Activation Assay Using the IncuCyte

[0894] After transduction with the appropriate retrovirus, 5×10⁴ T cells were seeded per well into a 96-well plate in the presence or absence of drugs (rimiducid or rapamycin) in CTL medium in the presence of IL-2. To enable detection of apoptosis using the IncuCyte instrument, 2 μM of IncuCyte™ Kinetic Caspase-3/7 Apoptosis reagent (Essen Bioscience, 4440) was added to each well to reach a total volume of 200 μl. The plates were centrifuged for 5 min at 400×g and placed inside the IncuCyte (Dual Color Model 4459) to monitor green fluorescence every 2-3 hours for a total of 48 hours at 10× objective. Image analysis was performed using the “Tcells_caspreagent_phase_green_10×_MLD” processing definition. The “Total Green Object Integrated Intensity” metric and the “Phase Object Confluence (Percent)” were used to quantify caspase activation. Each condition was performed in duplicate and each well was imaged at 4 different locations.

$$\begin{matrix}“ caspase 3 / 7 activation ” readout = \underline{Metric : Total Green Object Integrated Intensity ( GCU \times {μm}^{2} / Image )} \\ Metric : Phase Object Confluence ( Percent )\end{matrix}$$

### Animal Model

[0895] 8-week-old female, immune-deficient mice (NOD.CgPrkdc^{scid} II2rg^{tm1Wjl}/SzJ; NSG) were injected IV with 1×10⁶ T cells in 100 μl PBS. Mice were subjected to IVIS imaging ˜4 hrs after T cell injection (−14 hrs post-drug administration). The following day, mice were imaged just before drug injection (0 hrs), then injected IP with vehicle, rimiducid diluted in solutol and PBS, or rapamycin diluted in “PT”. Mice were imaged again at 5-6 hrs, and 24 hrs after drug injection. Mice were sacrificed and spleens were removed for FACS analysis.

### In Vivo Bioluminescence Imaging

[0896] Mice were imaged for firefly luciferase-derived bioluminescence at the indicated time points relative to administration of drug or vehicle.

### Results

### Topology of FRB and FKBP in Chimeric Caspase-9 Polypeptides

[0897] Since the order and spacing of signaling elements and binding domains may affect outcomes, the order of ligand-binding domains with the inducible chimeric Caspase-9 polypeptides was examined (FRB.FKBP.ΔC9 (pBP1310) and FKBP.FRB.ΔC9 (pBP1311)) (FIG. 106A). A caspase activation assay that utilizes the caspase 3/7 green reagent (in which caspase activity is captured by the cleavage of the peptide reagent which releases a green fluorophore, green fluorescencent emission thereby marks cells undergoing apoptosis) revealed that FRB.FKBP.ΔC9 is slightly more sensitive than FKBP.FRB.ΔC9 to rapamycin-mediated initiation of apoptosis in T cells (FIG. 106B). This modest difference may be attributed to higher FRB.FKBP.ΔC9 protein level compared to that of the FKBP.FRB.ΔC9 (FIG. 106C).

[0898] Since the chimeric iRC9 caspase polypeptide contains the wild-type FKBP domain, it was necessary to determine the concentration of rimiducid capable of triggering dimerization and caspase activation. In this assay, 293 cells were transiently transfected with vectors expressing FKBPv36 Caspase-9 (iC9) and the two similar rapamycin-inducible variants (FRB.FKBP.ΔC9 and FKBP.FRB.ΔC9) (FIG. 107) and treated with half-log dilution of either rapamycin or rimiducid. Cells underwent either a caspase activation assay in the presence of caspase 3/7 green reagent and monitored by IncuCyte or alternatively, Rapamycin-mediated cell death was measured indirectly by a secreted alkaline phosphatase (SEAP) assay using a constitutive SRα-SEAP reporter. Functionally, the rapamycin inducible and the rimiducid inducible chimeric Caspase-9 polypeptides appear to induce caspase cleavage with similar kinetics and threshold when activated by their respective suicide drugs (FIG. 107A). In contrast, data obtained from the SEAP assay demonstrates that the rimiducid-inducible switch in the iC9 chimeric caspase polypeptide is more sensitive to activation at low rimiducid concentrations compared with the rapamycin-inducible caspase-9 switches (iRC9) at low rapamycin concentrations (FIG. 107B).

[0899] The rapamycin inducible chimeric Caspase-9 polypeptide, iRC9, is highly active even in the presence of as little as 100 pM rapamycin, with some efficacy at even lower drug levels, albeit with slower kinetics. When comparing the two iRC9 polypeptides, FRB.FKBP.ΔC9 versus FKBP.FRB.ΔC9, FRB.FKBP.ΔC9 is active at lower rapamycin concentration than FKBP.FRB.ΔC9, consistent with data obtained in FIG. 106B. Finally, the iRC9 chimeric Caspase-9 polypeptide is insensitive to rimiducid below 100 nM making it feasible to combine this rapamycin-induced off-switch with another rimiducid-medicated switch (for example, iMC).

Chimeric iRmC9-Expressing T Cells can be Activated by Both Rimiducid and Rapamycin In Vitro.

[0900] The iRmC9 (FRB.Fᵥ.ΔC9 (pBP1327) and Fᵥ.FRB.ΔC9 (pBP1328)) were generated by mutating the FKBP domain within iRC9 to F36V to accommodate rimiducid binding. A SRα-SEAP assay was performed to assess the drug specificity of the 3 off-switches: iC9 (pBP220), IRC9s (pBP1310 & 1311), and iRmC9 (pBP1327 & pBP1328). The plasmid pBP1501 contains only the ΔC9 domain and serves as a negative control for drug induction (FIG. 106A). Rimiducid can activate both iC9 and iRmC9 switches but requires >100 nM ligand to activate the iRC9 switch (FIG. 108A). Conversely, rapamycin can activate both iRC9 and iRmC9 switches but is not able to induce dimerization of iC9 even at 1000 nM concentration.

[0901] To determine the functionality of these switches in activated T cells, retroviral supernatants were produced and transduced into PBMCs activated from 3 separate donors. T cells expressing the different caspase-9 switches were subjected to a killing assay with increasing doses of rimiducid and rapamycin in the presence of caspase 3/7 green reagent and monitored by IncuCyte (FIG. 108B). As observed by SRα-SEAP assay, rimiducid can activate iC9 and iRmC9 but not iRC9, which comprises the wild type FKBP12, while rapamycin is able to activate iRC9 and iRmC9, but not iC9. Negative control ΔC9 alone (pBP1501) was not active in the presence of either rimiducid or rapamycin. Of note, rimiducid activates FRB.Fᵥ.ΔC9 (pBP1327) with greater efficiency than Fᵥ.FRB.ΔC9 (pBP1328), possibly due to the Fᵥ domain being proximal to caspase-9. The protein level of the inducible caspases was determined by Western blot. iC9 is expressed at higher levels compared to both iRC9 and iRmC9 (FIG. 108C). Based on these data, the following plasmids were selected to proceed to further in vivo testing: iC9 (pBP0220), iRC9 (pBP1310), and iRmC9 (pBP1327).

iRmC9 T Cells can be Activated by Both Rimiducid and Rapamycin In Vivo.

[0902] PBMCs from donor 676 were activated and co-transduced with one of the off-switches and GFP-Fluc retroviruses. Eleven days after transduction, cells were analyzed for transduction efficiency with GFP and anti-CD3/anti-CD19 antibodies (FIG. 109A). This analysis showed that iC9 T cells were 41% GFP⁺/CD19⁺, IRC9 T cells were 65% GFP⁺/CD19⁺ and iRmC9 T cells were 51% GFP⁺/CD19⁺. The CD19⁺ MFI for the different T cell populations were: iC9=15.07, iRC9=14.38, and iRmC9=13.39. The cells were collected, counted, washed, and resuspended at 1×10⁶ cells in 100 μl PBS for each tail vein mouse injection (Table 10) (time=−18 hr). The next day, 5 mg/kg rimiducid (dissolved in solutol and PBS) or 10 mg/kg rapamycin (dissolved in detergent-based excipient “PT”) 10% PEG-400+17% Tween-80) were injected intraperitoneally into each respective group (time=0 hr). IVIS imaging was performed at −14, 0, 5, 24 and 29 hours. Mice were sacrificed and spleens were collected for FACS analysis with hCD3, hCD19 and mCD45 antibodies. Rimiducid administration induced significant removal of IC₉ and iRmC9 T cells while rapamycin induced removal of iRC9 and iRmC9 T cells (FIGS. 109B & C). The relatively high level of BLI signal detected in the iC9 group treated with rimiducid may be attributed to the high single GFP⁺ population (41%) in the transduced T cells (FIG. 109A). Interestingly, in the iC9-expressing T cell group treated with rapamycin, IVIS imaging shows higher signal compared to the respective no drug group, suggesting that the rapamycin vehicle that is composed of the PT might boost the bioluminescence detected. Analysis of splenocytes revealed that ˜20% of iC9 T cells remained after rimiducid treatment compared to those in treated with no drug- or rapamycin-treated groups (FIG. 109D). Similarly, at 24 hours, approximately ˜25% of iRC9 T cells remained following rapamycin treatment compared to those in the no drug- and rimiducid-treated groups. In the iRmC9 group, ˜50% and ˜40% of the iRmC9 T cells remained following rimiducid or rapamcyin administration, respectively. The higher percentage of remaining iRmC9 T cells observed may be due to an artifact of normalizing the no drug group. In the graph that plots the CD19⁺ MFI of splenocytes (FIG. 109D, right graph), iRmC9 T cells had lower CD19⁺ MFI as seen before injection compared to the other groups, and the T cells that remained in the spleens post-drug treatment had similar CD19⁺ MFIs to the iC9 and iRC9-treated groups.

Drug Titration of Rimiducid and Rapamycin in Mice Bearing iRmC9 T Cells.

[0903] The iRmC9 construct represents an ideal switch that can allow for direct comparison of rimiducid versus rapamycin-induced killing kinetics in the same molecule. In this experiment, iRmC9 T cells were produced by co-transduction with pBP1327 and GFP-Fluc retroviruses from donor 584. Ten days post-transduction, FACS analysis indicated that 73% of the cells were GFP⁺/CD19⁺ and the CD19⁺ MFI was 15.23 (FIG. 110A). Ten million iRmC9 T cells were injected IV per mouse (Table 10) (time=−14 hr). The next day, rimiducid (dissolved in solutol and PBS) or rapamycin (dissolved in PT) were injected intraperitoneally into each respective group (time=0 hr). Vehicle groups received either PBS, 25% solutol in PBS or 5% DMA in PT. IVIS imaging was performed at −10, 0, 6, and 24 hours. Mice were sacrificed and spleens were collected for FACS analysis with hCD3, hCD19 and mCD45 antibodies. IVIS imaging for the rimiducid dose titration shows dose-dependent removal of iRmC9 T cells (FIGS. 110B & C). In contrast, IVIS imaging in the rapamycin-dosed groups shows an unexpected increase in IVIS signal detected that is most pronounced in the vehicle-treated group, but is not observed in the PBS-treated group (FIG. 110B). This observation is similar to that observed in the previous experiment (FIG. 109B) and could be due to the components of the PT. Splenocyte analysis however showed a similar dose-response with regards to deletion of iRmC9-modified T cells by rimiducid or rapamycin (FIG. 110D).

[0904] FIG. 106. Topology of FRB and FKBP in iRC9. (FIG. 106A) PBMCs from donor 920 were activated and transduced with pBP1310 and pBP1311 vectors. (FIG. 106B) Five days post-transduction, T cells were seeded on 96-well plates with 0, 0.8, 4 and 20 nM rapamycin. Additionally, 2 μM caspase 3/7 green reagent was added to monitor caspase cleavage by the IncuCyte. Line graphs depict caspase activation over 24 hours post-rapamycin treatment of FRB.FKBP.ΔC9 versus FKBP.FRB.ΔC9. (FIG. 106C) Protein expression of the iRC9 T cells was analyzed by Western blot using antibodies to hCaspase-9 and β-actin.

[0905] FIG. 107. High (>100 nM) rimiducid concentration is required to activate iRC9. 293 cells were seeded at 300,000 cells/well in a 6-well plate and allowed to grow for 2 days. After 48 h, cells were transfected with 1 μg of experimental plasmids. Cells were harvested 48 h after transfection and diluted 2.5× their original volume. (FIG. 107A) For the Incucyte/casp3/7 assay, 50 μl of cells were plated per well including either rimiducid or rapamycin drug and caspase 3/7 green reagent (2.5 UM final concentration). (FIG. 107B) For the SEAP assays, 100 μl of cells were plated in a 96-well plate with (half-log) rimiducid (or rapamycin) drug dilutions and ˜ 18 h after drug exposure, plates were heat-inactivated before substrate (4-MUP) addition.

[0906] FIG. 108. iRmC9 T cells can be activated by both rimiducid and rapamycin in vitro. (FIG. 108A) The SRα SEAP assay was performed by co-transfecting 293 cells with the pBP1501, 220, 1310, 1311, 1327, 1328 vectors and the SRα-SEAP reporter plasmid. (FIG. 108B) For the Incucyte/casp3/7 assay, T cells were seeded on 96-well plates with increasing rimiducid and rapamycin concentrations in the presence of 2 μM caspase 3/7 green reagent to monitor caspase cleavage by the IncuCyte. (FIG. 108C) Protein expression of the iRC9 T cells was analyzed by Western blot using antibodies to hCaspase-9 and β-actin.

[0907] FIG. 109. iRmC9 T cells can be activated by both rimiducid and rapamycin in vivo. PBMCs from donor 676 were activated and co-transduced with retroviruses encoding the pBP0220, 1310, 1327 vectors and the GFP-Fluc plasmid. (FIG. 109A) Eleven days post transduction, the cells were analyzed for CD19 and GFP transduction efficiency prior to injection into mice. (FIGS. 109B & C) NSG mice were injected i.v. with 107 T cells co-transduced with GFP-Fluc per mouse and suicide drugs were injected i.p. the next day. Bioluminescence of cells was assessed at −14, 0, 5, 24, and 29 hours post-drug administration. (FIG. 109D) At 29-h post-drug treatment, mice were euthanized and spleens were collected for flow cytometry analysis with antibodies to hCD3, hCD34, and mCD45

[0908] FIG. 110. Drug titration of rimiducid and rapamycin in mice bearing iRmC9 T cells. PBMCs from donor 584 were activated and co-transduced with retroviruses encoding the pBP1327 vector and the GFP-Fluc plasmid. (FIG. 110A) Ten days post-transduction, the cells were analyzed for CD19 and GFP transduction efficiency prior to injection into mice. (FIGS. 110B & C) NSG mice were injected i.v. with 1×107 T cells co-transduced with GFP-Fluc per mouse and suicide drugs were injected i.p. the next day. Bioluminescence of cells was assessed at −10, 0, 6, and 24 hours post drug administration. (FIG. 110D) At 24 h post-drug treatment, mice were euthanized and spleens were collected for flow cytometry analysis with antibodies to hCD3, hCD34, and mCD45.

TABLE 9
Comparing the apoptotic activation
of iC9, iRC9, and iRmC9 in vivo.

| | | | # of |
|---|---|---|---|
| Group # | T cells (GFP-Fluc) | Suicide drug | mice |
| 1 | 220 | No treatment | 3 |
| 2 | 220 | 5 mg/kg rimiducid | 5 |
| 3 | 220 | 10 mg/kg rapamycin | 3 |
| 4 | 1310 | No treatment | 3 |
| 5 | 1310 | 5 mg/kg rimiducid | 3 |
| 6 | 1310 | 10 mg/kg rapamycin | 5 |
| 7 | 1327 | No treatment | 3 |
| 8 | 1327 | 5 mg/kg rimiducid | 5 |
| 9 | 1327 | 10 mg/kg rapamycin | 5 |
| Total # of mice | | | 35 |

TABLE 10
Drug titration of rimiducid and rapamycin in mice bearing iRmC9

| | | Rimiducid | Rapamycin | # of |
|---|---|---|---|---|
| Group # | T cells (GFP-Fluc) | (mg/kg) | (mg/kg) | mice |
| 1 | 1327 (+Saline) | 0 | 0 | 3 |
| 2 | 1327 | 25% Solutol | 0 | 3 |
| | | in Saline | | |
| 3 | 1327 | 0 | 5% DMA in PT | 3 |
| 4 | 1327 | 5* | 0 | 3 |
| 5 | 1327 | 0.5* | 0 | 4 |
| 6 | 1327 | 0.05* | 0 | 4 |
| 7 | 1327 | 0.005 | 0 | 4 |
| 8 | 1327 | 0.0005 | 0 | 4 |
| 9 | 1327 | 0.00005 | 0 | 4 |
| 10 | 1327 | 0 | 10+ | 3 |
| 11 | 1327 | 0 | 1+ | 4 |
| 12 | 1327 | 0 | 0.1+ | 4 |
| 13 | 1327 | 0 | 0.01+ | 4 |
| 14 | 1327 | 0 | 0.001+ | 4 |
| 15 | 1327 | 0 | 0.0001+ | 4 |

| | |
|---|---|
| Total # of mice | 55 |

*solutol placebo added to control for 25% solutol in saline
+DMA controlled to 5% DMA in PT.

### SUMMARY

[0909] The kinetics and efficiency of apoptosis induction following dimerizer ligand administration between three different caspase-9-enabled safety switches were compared. In general, the capacity of apoptotic induction is similar between iC9, iRC9, and iRmC9 off-switches when triggered with their respective drug(s), but there are some nuances with regards to kinetics and dose-response. Thus, these three safety-switch designs expand the toolbox of molecules that can be used for current and future clinical applications where there is a critical need for an off mechanism.

[0910] Because rapamycin and rimiducid are predicted to have different pharmacodynamic properties, one potential application for this technology could be in the choice of a ligand that can provide tissue selectivity. For example, should rimiducid be excluded from the brain due to the impermeability of the blood brain barrier, a iRmC9 switch could be activated by rapamycin. Alternatively, if titration of T cell numbers is required, the dose-response curve of one drug over another could be an important determinant of the decision of which to deploy. Moreover, if oral delivery is needed, rapamycin or analogs may be the logical choice.

### Example 31: Inducible MyD88-CD40 Costimulation Provides Ligand-Dependent Tumor Eradication by CD123-Specific Chimeric Antigen Receptor T Cells

[0911] Provided is an example of the use of one of the two molecular switches, iMC, in the context of costimulation of CD123-specific chimeric antigen receptor expressing T cells. Promising clinical results with CD19-specific chimeric antigen receptor (CAR)-directed T cells for the treatment of B cell leukemia and lymphoma suggest that CARs may be effective in other hematological malignancies, such as acute myeloid leukemia (AML).

[0912] CD123/IL-3Rα is an attractive CAR-T cell target due to its high expression on both AML blasts and leukemic stem cells (AML-LSCs). However, the antigen is also expressed at lower levels on normal stem cell progenitors presenting a major toxicity concern should CD123-specific CAR-T cells show long-term persistence.

[0913] The iMC-CAR costimulation platform iMC uses a proliferation-deficient, first generation, CD123-specific CAR together with a ligand (rimiducid (Rim))-dependent costimulatory switch (inducible MyD88/CD40 (IMC)) to provide physician-controlled eradication of CD123⁺ tumor cells and regulate long-term CAR-T cell engraftment.

[0914] Retrovirus and transduction: T cells were activated with anti-CD3/28 antibodies and subsequently transduced with a bicistronic retrovirus encoding tandem Rim-binding domains (FKBP12v36), cloned in-frame with MyD88 and CD40 cytoplasmic signaling molecules, and first generation CAR targeting CD123 (SFG-iMC-CD123.ζ) (FIG. 111).

[0915] Coculture assay: The effects of iMC costimulation on CD123-targeted CARs were assessed in coculture assays with CD123⁺, EGFPluciferase (EGFPluc)-modified leukemic cell lines (KG1, THP-1 and MOLM-13) with and without Rim using the IncuCyte live cell imaging system. IL-2 production was examined by ELISA from coculture supernatants.

[0916] Animal experiments: In vivo efficacy of iMC-CD123.ζ-modified T cells was assessed using an immune-deficient NSG tumor xenograft model. One million EGFPluc-expressing CD123⁺ THP-1 tumor cells were injected i.v. into the animals, followed by a single i.v. injection on day 7 with varying non-transduced or iMC-CD123.ζ-modified T cells. Groups receiving CAR-T cells subsequently received i.p. injections of Rim (1 mg/kg) or vehicle only on days 0 and 15 post-T cell injection. Animals were evaluated for THP-1-EGFPluc tumor burden and weight change on a weekly basis using IVIS bioluminescent imaging (BLI) and for T cell persistence by flow cytometry and qPCR at day 30 post-T cell injection.

[0917] FIG. 112: PBMCs from 2 donors were activated and transduced with retrovirus encoding the CD123 iMC+CARζ−T vector. Six days post-transduction, T cells were seeded onto 96-well plates at 1:10 E:T ratios with THP1-GFP. Fluc cells or HPAC-RFP cells in the presence of 0, 0.1, or 1 nM rimiducid and placed in the IncuCyte to monitor the kinetics THP1-GFP.Fluc or HPAC-RFP growth. (A & B) Two days post-seeding, culture supernatants from a duplicate plate were analyzed for IL-6 and IL-2 production by ELISA. (C) Total green fluorescence intensity of THP1-GFP.Fluc and (D) number of HPAC-RFP cells per well were analyzed using the basic analyzer software for the IncuCyte at day 7.

[0918] FIG. 113. PBMCs from 4 donors were activated and co-transduced with retroviruses encoding the CD123 iMC+CARζ−T and RFP vectors. Ten days post-transduction, T cells were seeded onto 96-well plates at 1:1 E:T ratios with THP1-GFP. Fluc cells in the presence of 0 or 1 nM rimiducid and placed in the IncuCyte to monitor the kinetics THP1-GFP.Fluc and T cell-RFP growth. (A) Two days post-seeding, culture supernatants from a duplicate plate were analyzed for IL-2 production by ELISA. (B) On day 7, cells were analyzed for the number of THP1-GFP.Fluc and (C) T cell-RFP remained in the coculture by flow cytometry. (D) Time course monitor of THP1-GFP. Fluc green fluorescence and (E) T cell-RFP red fluorescence analyzed using the IncuCyte for a total of 7 days.

[0919] FIG. 114. (A) PBMCs were activated and transduced with retrovirus including the CD123 iMC-CARζ vector. Twelve days after transduction, CAR expression was determined using anti-Q-bend 10 antibody before injection into mice. (B) NSG mice were engrafted with 1×10⁶ THP1-GFP.Fluc cells i.v. for 7 days followed by infusion of 2.5×10⁶ non-transduced (NT) or CD123 iMC-CARζ cells i.v. Rimiducid or placebo were given i.p. on days 0 and 15 after T cell infusion at 1 mg/kg. (C) THP1-GFP.Fluc growth was measured using IVIS bioluminescence. (D, E) On day 30, mice were sacrificed and spleens were analyzed for the presence of CAR-T cells by flow cytometry and vector copy number assay.

[0920] FIG. 115: (A) NSG mice were engrafted with 1×106 THP1-GFP. Fluc cells i.v. for 7 days followed by treatment with 10e6 NT T cells or various doses of CD123 iMC+CARζ−T cells i.v. Rimiducid or placebo were given i.p. on days 0 and 15 after T cell infusion at 1 mg/kg. (B) On day 29, mice were sacrificed and spleens were analyzed for the presence of CAR-T cells by vector copy number assay.

[0921] An iMC-CARζ platform comprising a ligand-dependent activation switch and a proliferation-deficient first generation CAR, efficiently eradicated CD123⁺ leukemic cells when costimulation is provided by systemic rimiducid administration. Deprivation of iMC costimulation resulted in reduction of CAR-T levels, providing a user-controlled system for managing persistence and safety of CD123-specific CAR-T cells.

### Example 32: Inducible MyD88/CD40 Enhances Proliferation and Survival of Tumor-Specific TCR-Modified T Cells and Improves Anti-Tumor Efficacy in Myeloma

[0922] Provided is an example of the use of one of the two molecular switches, iMC, in the context of tumor-specific recombinant TCR-expressing T cells.

[0923] Cancer immunotherapy using T cells engineered to express tumor antigen-specific TCRs has shown promise in the clinic; however, durable responses have been limited by poor T cell expansion and persistence in vivo. In addition, downregulation of MHC class I on tumor cells diminishes T cell recognition, leading to reduced therapeutic efficacy.

[0924] Inducible MyD88/CD40 (IMC) is a rimiducid (AP1903)-dependent costimulatory molecule that enhances DC activation1 and T cell proliferation and survival. PRAME (PReferentially expressed Antigen in MElanoma) is a cancer testis (CT) antigen that is overexpressed in a number of cancers, including melanoma, sarcoma, AML, CML, neuroblastoma, breast, lung, head and neck cancers, but not in normal tissues. Bob1 (also known as OCA-B, OBF1 or POU2AF1) is a B cell-specific transcriptional co-activator that is highly expressed in CD19⁺ B cells, ALL, CLL, MCL and multiple myeloma (MM).

[0925] FIG. 116 is a schematic of a “Costimulation on demand” system, controlled using an inducible costimulatory polypeptide (iMC) to better regulate potent T cell therapy. T cell activation and proliferation is TCR- and iMC-dependent. Maximal tumor-directed cytotoxicity, as well as T cell persistence in vivo, requires synergistic signals from a tumor-specific TCR and rimiducid-activated iMC.

[0926] FIG. 117: (A-C) Retroviral vectors expressing PRAME TCR (Amir, et al.), or a vector encoding a PRAME TCR, an iMC polypeptide, and a surface marker, (D) PRAME TCR recognition of SLL-peptide pulsed T2 cells synergizes with rimiducid-dependent iMC signals for maximal IL-2 secretion.

[0927] FIG. 118: (A) Trans-well assay set-up. (B) Cytokines secreted by transduced T cells in the top well upregulate HLA class I on the surface of SK-N-SH neuroblastoma cells in an antigen-independent, but iMC- and rimiducid-dependent manner.

[0928] FIG. 119 (A) iMC-PRAME TCR-mediated cytotoxicity against HLA-A2⁺PRAME⁺ U2OS osteosarcoma is rimiducid-independent (B) Signals from the PRAME TCR synergize with rimiducid-driven iMC costimulation, resulting in maximal IL-2 secretion. The Go156 TCR is a negative control TCR.

[0929] FIG. 120: (A) iMC-Bob-1 TCR-mediated cytotoxicity against HLA-B7⁺Bob-1⁺ U266 multiple myeloma is rimiducid-independent. (B) Signals from the Bob-1 TCR synergize with rimiducid-driven iMC costimulation, resulting in maximal IL-2 secretion. Go156 TCR is a negative control TCR.

[0930] FIG. 121: (A) NSG mice were engrafted with 1×10⁶ luciferase-expressing U266 myeloma cells and treated with 1×107 non-transduced, PRAME TCR- or iMC-PRAME TCR-transduced T cells on day 13. Starting on day 14, five of the mice that received iMC-PRAME-transduced T cells received 5 mg/kg rimiducid i.p. weekly until day 38. (B) Tumor growth was measured by bioluminescence imaging. (C,D) Mice were sacrificed on day 94 and the spleens were analyzed for persistence of human T cells. IMC costimulation significantly increased the number of Vβ1⁺CD8⁺ T cells (C) but not the number of VB 1⁺CD4⁺ T cells (D).

[0931] Rimiducid-driven iMC activation provides potent costimulatory signals in transduced T cells, synergizing with signals from exogenous PRAME- or Bob1-specific TCRs, leading to enhanced T cell proliferation/survival and improved anti-tumor efficacy both in vitro and in vivo.

[0932] iMC activation upregulates HLA class I levels on tumor targets, which should lead to improved cytotoxicity via both engineered and endogenous T cells.

### REFERENCES

[0933] Narayanan P et al., A composite MyD88/CD40 switch synergistically activates mouse and human dendritic cells for enhanced antitumor efficacy. J Clin Invest. (2011) 121:1524.
[0934] Amir A L et al., PRAME-specific Allo-HLA-restricted T cells with potent antitumor reactivity useful for therapeutic T-cell receptor gene transfer. Clin Cancer Res (2011) 17:5615.

### Example 33: Representative Embodiments

[0935] Provided hereafter are examples of certain embodiments of the technology.

[0936] A1. A nucleic acid comprising a promoter operably linked to a first polynucleotide coding for a first chimeric polypeptide, wherein:
[0937] the first chimeric polypeptide comprises a first multimerizing region that binds to a first ligand;
[0938] the first multimerizing region comprises a first ligand binding unit and a second ligand binding unit;
[0939] the first ligand is a multimeric ligand comprising a first portion and a second portion;
[0940] the first ligand binding unit binds to the first portion of the first ligand and does not bind significantly to the second portion of the first ligand; and
[0941] the second ligand binding unit binds to the second portion of the first ligand and does not bind significantly to the first portion of the first ligand.

[0942] A2. The nucleic acid of embodiment A1, wherein the first chimeric polypeptide comprises a pro-apoptotic polypeptide region.

[0943] A2.1. The nucleic acid of embodiment A2, wherein the first multimerizing region is amino terminal to the pro-apoptotic polypeptide region.

[0944] A2.2. The nucleic acid of embodiment A2, wherein the first multimerizing region is carboxyl terminal to the pro-apoptotic polypeptide region.

[0945] A3. The nucleic acid of embodiment A1, wherein the first chimeric polypeptide comprises
[0946] a) a MyD88 polypeptide region or a truncated MyD88 polypeptide region lacking the TIR domain; and
[0947] b) a CD40 cytoplasmic polypeptide region lacking the CD40 extracellular domain.

[0948] A4. The nucleic acid of any one of embodiments A1-A3, comprising a second polynucleotide coding for a second chimeric polypeptide, wherein:
[0949] the promoter is operably linked to the second polynucleotide;
   [0950] the second chimeric polypeptide comprises a second multimerizing region that binds to a second ligand;
   [0951] the second multimerizing region comprises a third ligand binding unit;
   [0952] the second ligand is a multimeric ligand comprising a third portion; and
   [0953] the third ligand binding unit binds to the third portion of the second ligand and does not bind significantly to the second portion of the first ligand.

[0954] A5. The nucleic acid of embodiment A4, wherein the first portion of the first ligand and the third portion of the second ligand are the same.

[0955] A6. The nucleic acid of embodiment A4, wherein the first portion of the first ligand and the third portion of the second ligand are different.

[0956] A7. The nucleic acid of embodiment A4, wherein the first ligand binding unit of the first multimerizing region and the third ligand binding unit of the second multimerizing region are the same.

[0957] A8. The nucleic acid of embodiment A4, wherein the first ligand binding unit of the first multimerizing region and the third ligand binding unit of the second multimerizing region are different.

[0958] A9. The nucleic acid of any one of embodiments A4-A8, wherein the second chimeric polypeptide comprises a pro-apoptotic polypeptide region and the first chimeric polypeptide does not comprise the pro-apoptotic polypeptide region.

[0959] A10. The nucleic acid of embodiment A9, wherein the second chimeric polypeptide comprises
[0960] a) a MyD88 polypeptide region or a truncated MyD88 polypeptide region lacking the TIR domain; and
[0961] b) a CD40 cytoplasmic polypeptide region lacking the CD40 extracellular domain
[0962] wherein the second multimerizing region of the second chimeric polypeptide comprises at least two third binding units.

[0963] A11. The nucleic acid of any one of embodiments A1-A8, wherein the second chimeric polypeptide comprises an MC polypeptide, wherein the MC polypeptide comprises
[0964] a) a MyD88 polypeptide region or a truncated MyD88 polypeptide region lacking the TIR domain; and
[0965] b) a CD40 cytoplasmic polypeptide region lacking the CD40 extracellular domain and the first chimeric polypeptide does not comprise the MC polypeptide.

[0966] A12. The nucleic acid of embodiment A11, wherein the second chimeric polypeptide comprises a pro-apoptotic polypeptide region.

[0967] A13. The nucleic acid of any one of embodiments A1-A12, wherein the first ligand binding unit is FKBP12 or an FKBP12 variant.

[0968] A14. The nucleic acid of embodiment A13, wherein the first ligand binding unit is FKBP12.

[0969] A15. The nucleic acid of any one of embodiments A1-A14, wherein the second ligand binding unit is FRB or an FRB variant.

[0970] A16. The nucleic acid of embodiment A15, wherein the second ligand binding unit is FRB_{L}.

[0971] A17. The nucleic acid of any one of embodiments A1-A16, wherein the third ligand binding unit is FKBPv36.

[0972] A18. The nucleic acid of embodiment A17, wherein the first ligand binding unit is not FKBPv36.

[0973] A19. The nucleic acid of any one of embodiments A1-A18, wherein the first ligand is rapamycin or a rapalog.

[0974] A20. The nucleic acid of any one of embodiments A1-A19, wherein the second ligand is AP1903.

[0975] A21. The nucleic acid of any one of embodiments A1-A20, wherein the third ligand binding unit binds to the third portion of the second ligand with 100× more affinity than the first ligand binding unit binds to the third portion of the second ligand.

[0976] A22. The nucleic acid of embodiment any one of embodiments A1-A20, wherein the third ligand binding unit binds to the third portion of the second ligand with 500× more affinity than the first ligand binding unit binds to the third portion of the second ligand.

[0977] A23. The nucleic acid of any one of embodiments A1-A20, wherein the third ligand binding unit binds to the third portion of the second ligand with 1000× more affinity than the first ligand binding unit binds to the third portion of the second ligand.

[0978] A24. The nucleic acid of any one of embodiments A1-A23, further comprising a polynucleotide that encodes a chimeric antigen receptor.

[0979] A25. The nucleic acid of embodiment A24, wherein the chimeric antigen receptor comprises (i) a transmembrane region, (ii) a T cell activation molecule, and (iii) an antigen recognition moiety.

[0980] A26. The nucleic acid of any one of embodiments A1-A23, further comprising a polynucleotide that encodes a chimeric T cell receptor.

[0981] A27. A modified cell comprising a nucleic acid of any one of embodiments A1-A26.

[0982] A28. A modified cell, comprising a first polynucleotide coding for a first chimeric polypeptide, wherein:
[0983] the first chimeric polypeptide comprises a first multimerizing region that binds to a first ligand;
[0984] the first multimerizing region comprises a first ligand binding unit and a second ligand binding unit;
[0985] the first ligand is a multimeric ligand comprising a first portion and a second portion;
[0986] the first ligand binding unit binds to the first portion of the first ligand and does not bind significantly to the second portion of the first ligand; and
[0987] the second ligand binding unit binds to the second portion of the first ligand and does not bind significantly to the first portion of the first ligand.

[0988] A29. The modified cell of embodiment A28, wherein the first chimeric polypeptide comprises a pro-apoptotic polypeptide region.

[0989] A30. The modified cell of embodiment A28, wherein the first chimeric polypeptide comprises
[0990] a) a MyD88 polypeptide region or a truncated MyD88 polypeptide region lacking the TIR domain; and
[0991] b) a CD40 cytoplasmic polypeptide region lacking the CD40 extracellular domain.

[0992] A31. The modified cell of any one of embodiments A28-A30, comprising a second polynucleotide coding for a second chimeric polypeptide, wherein:
[0993] the second chimeric polypeptide comprises a second multimerizing region that binds to a second ligand;
[0994] the second multimerizing region comprises a third ligand binding unit;
[0995] the second ligand is a multimeric ligand comprising a third portion; and
[0996] the third ligand binding unit binds to the third portion of the second ligand and does not bind significantly to the second portion of the first ligand.

[0997] A32. The modified cell of embodiment A31, wherein the first portion of the first ligand and the third portion of the second ligand are the same.

[0998] A33. The modified cell of embodiment A31, wherein the first portion of the first ligand and the third portion of the second ligand are different.

[0999] A34. The modified cell of embodiment A31, wherein the first ligand binding unit of the first multimerizing region and the third ligand binding unit of the second multimerizing region are the same.

[1000] A35. The modified cell of embodiment A31, wherein the first ligand binding unit of the first multimerizing region and the third ligand binding unit of the second multimerizing region are different.

[1001] A36. The modified cell of any one of embodiments A31-A35, wherein the second chimeric polypeptide comprises a pro-apoptotic polypeptide region and the first chimeric polypeptide does not comprise the pro-apoptotic polypeptide region.

[1002] A37. The modified cell of embodiment A36, wherein the second chimeric polypeptide comprises
[1003] a) a MyD88 polypeptide region or a truncated MyD88 polypeptide region lacking the TIR domain; and
[1004] b) a CD40 cytoplasmic polypeptide region lacking the CD40 extracellular domain
[1005] wherein the second multimerizing region of the second chimeric polypeptide comprises at least two third binding units.

[1006] A38. The modified cell of any one of embodiments A28-A35, wherein the second chimeric polypeptide comprises an MC polypeptide, wherein the MC polypeptide comprises
[1007] a) a MyD88 polypeptide region or a truncated MyD88 polypeptide region lacking the TIR domain; and
[1008] b) a CD40 cytoplasmic polypeptide region lacking the CD40 extracellular domain and the first chimeric polypeptide does not comprise the MC polypeptide.

[1009] A39. The modified cell of embodiment A38, wherein the second chimeric polypeptide comprises a pro-apoptotic polypeptide region.

[1010] A40. The modified cell of any one of embodiments A28-A39, wherein the first ligand binding unit is FKBP12 or an FKBP12 variant.

[1011] A41. The modified cell of embodiment A40, wherein the first ligand binding unit is FKBP12.

[1012] A42. The modified cell of any one of embodiments A28-A41, wherein the second ligand binding unit is FRB or an FRB variant.

[1013] A43. The modified cell of embodiment A42, wherein the second ligand binding unit is FRB_{L}.

[1014] A44. The modified cell of any one of embodiments A28-A43, wherein the third ligand binding unit is FKBPv36.

[1015] A45. The modified cell of embodiment A44, wherein the first ligand binding unit is not FKBPv36.

[1016] A46. The modified cell of any one of embodiments A28-A45, wherein the first ligand is rapamycin or a rapalog.

[1017] A47. The modified cell of any one of embodiments A28-A46, wherein the second ligand is AP1903.

[1018] A48. The modified cell of any one of embodiments A28-A47, wherein the third ligand binding unit binds to the third portion of the second ligand with 100× more affinity than the first ligand binding unit binds to the third portion of the second ligand.

[1019] A49. The modified cell of embodiment any one of embodiments A28-A47, wherein the third ligand binding unit binds to the third portion of the second ligand with 500× more affinity than the first ligand binding unit binds to the third portion of the second ligand.

[1020] A50. The modified cell of any one of embodiments A28-A47, wherein the third ligand binding unit binds to the third portion of the second ligand with 1000× more affinity than the first ligand binding unit binds to the third portion of the second ligand.

[1021] A51. The modified cell of any one of embodiments A28-A50, further comprising a polynucleotide that encodes a chimeric antigen receptor.

[1022] A52. The modified cell of embodiment A51, wherein the chimeric antigen receptor comprises (i) a transmembrane region, (ii) a T cell activation molecule, and (iii) an antigen recognition moiety.

[1023] A53. The modified cell of any one of embodiments A28-A50, further comprising a polynucleotide that encodes a chimeric T cell receptor.

[1024] A54. A modified cell, comprising
[1025] a) a first chimeric polypeptide, wherein:
   the first chimeric polypeptide comprises a first multimerizing region that binds to a first ligand;
   the first multimerizing region comprises a first ligand binding unit and a second ligand binding unit;
   the first ligand is a multimeric ligand comprising a first portion and a second portion;
   the first ligand binding unit binds to the first portion of the first ligand and does not bind significantly to the second portion of the first ligand; and
   the second ligand binding unit binds to the second portion of the first ligand and does not bind significantly to the first portion of the first ligand; and
[1026] b) a second chimeric polypeptide, wherein:
   the second chimeric polypeptide comprises a second multimerizing region that binds to a second ligand;
   the second multimerizing region comprises a third ligand binding unit;
   the second ligand is a multimeric ligand comprising a third portion; and
   the third ligand binding unit binds to the third portion of the second ligand and does not bind significantly to the second portion of the first ligand.

[1027] A55. The modified cell of embodiment A54, comprising a first polynucleotide that encodes the first chimeric polypeptide and a second polynucleotide that encodes the second chimeric polypeptide.

[1028] A56. The modified cell of any one of embodiments A28-A55, comprising the first ligand or the second ligand.

[1029] A57. A kit or composition comprising nucleic acid comprising a first polynucleotide and a second polynucleotide, wherein
[1030] a) the a first polynucleotide encodes a first chimeric polypeptide, wherein:
   the first chimeric polypeptide comprises a first multimerizing region that binds to a first ligand;
   the first multimerizing region comprises a first ligand binding unit and a second ligand binding unit;
   the first ligand is a multimeric ligand comprising a first portion and a second portion; the first ligand binding unit binds to the first portion of the first ligand and does not bind significantly to the second portion of the first ligand; and
   the second ligand binding unit binds to the second portion of the first ligand and does not bind significantly to the first portion of the first ligand; and
[1031] b) the second polynucleotide encodes a second chimeric polypeptide,
   wherein the a second chimeric polypeptide, wherein: the second chimeric polypeptide comprises a second multimerizing region that binds to a second ligand;
   the second multimerizing region comprises a third ligand binding unit;
   the second ligand is a multimeric ligand comprising a third portion; and
   the third ligand binding unit binds to the third portion of the second ligand and does not bind significantly to the second portion of the first ligand.

[1032] 1. A nucleic acid comprising a promoter operably linked to a polynucleotide coding for a chimeric pro-apoptotic polypeptide, wherein the chimeric pro-apoptotic polypeptide comprises
[1033] a) a pro-apoptotic polypeptide region;
[1034] b) a FRB or FRB variant region; and
[1035] c) a FKBP12 polypeptide region.

[1036] 2. The nucleic acid of embodiment 1, wherein the order of regions (a), (b), and (c), from the amino terminus to the carboxyl terminus of the chimeric pro-apoptotic polypeptide is (c), (b), (a).

[1037] 3. The nucleic acid of embodiment 1, wherein the order of regions (a), (b), and (c), from the amino terminus to the carboxyl terminus of the chimeric pro-apoptotic polypeptide is (b), (c), (a).

[1038] 3.1. The nucleic acid of any one of embodiments 2 or 3, wherein (b) and (c) are amino terminal to the pro-apoptotic polypeptide.

[1039] 3.2. The nucleic acid of any one of embodiments 2 or 3, wherein (b) and (c) are carboxyl terminal to the pro-apoptotic polypeptide.

[1040] 4. The nucleic acid of any one of embodiments 1 to 3.2, wherein the chimeric pro-apoptotic polypeptide further comprises linker polypeptides between regions (a), (b), and (c).

[1041] 5. The nucleic acid of any one of embodiments 1-4, further comprising a polynucleotide coding for a marker polypeptide.

[1042] 6. A polypeptide encoded by a nucleic acid of any one of embodiments 1 to 5.

[1043] 7. A modified cell transfected or transduced with a nucleic acid of any one of embodiments 1 to 5.

[1044] 8. A nucleic acid comprising a promoter operably linked to
[1045] a) a first polynucleotide encoding a chimeric pro-apoptotic polypeptide, wherein the chimeric pro-apoptotic polypeptide comprises
   [1046] i) a pro-apoptotic polypeptide region;
   [1047] ii) a FRB or FRB variant region; and
   [1048] iii) a FKBP12 polypeptide region; and
[1049] b) a second polynucleotide encoding a chimeric costimulating polypeptide, wherein the chimeric costimulating polypeptide comprises
   [1050] i) two FKBP12 variant regions;
   [1051] ii) a MyD88 polypeptide region or a truncated MyD88 polypeptide region lacking the TIR domain; and
   [1052] iii) a CD40 cytoplasmic polypeptide region lacking the CD40 extracellular domain.

[1053] 8.2. A nucleic acid comprising a promoter operably linked to
[1054] a) a first polynucleotide encoding a chimeric pro-apoptotic polypeptide, wherein the chimeric pro-apoptotic polypeptide comprises
   [1055] i) a pro-apoptotic polypeptide region;
   [1056] ii) a FRB or FRB variant region; and
   [1057] iii) a FKBP12 polypeptide region; and
[1058] b) a second polynucleotide encoding a chimeric costimulating polypeptide, wherein the chimeric costimulating polypeptide comprises
   [1059] i) two FKBP12 variant regions; and
   [1060] ii) a MyD88 polypeptide region or a truncated MyD88 polypeptide region lacking the TIR domain.

[1061] 9. The nucleic acid of any one of embodiments 8 or 8.5, wherein the FKBP12 variant regions bind to a ligand with at least 100 times more affinity than the ligand binds to the FKBP12 region.

[1062] 9.1. The nucleic acid of embodiment 8, wherein the FKBP12 variant regions bind to a ligand with at least 500 times more affinity than the ligand binds to the FKBP12 region.

[1063] 9.2. The nucleic acid of embodiment 8, wherein the FKBP12 variant regions bind to a ligand with at least 1000 times more affinity than the ligand binds to the FKBP12 region.

[1064] 10. The nucleic acid of embodiment 8, wherein the FKBP12 variant regions are FKBP12v36 regions.

[1065] 11. A nucleic acid comprising a promoter operably linked to
[1066] a) a first polynucleotide encoding a chimeric pro-apoptotic polypeptide, wherein the chimeric pro-apoptotic polypeptide comprises
   [1067] i) a pro-apoptotic polypeptide region;
   [1068] ii) a FRB or FRB variant region; and
   [1069] iii) a FKBP12 polypeptide region; and
[1070] b) a second polynucleotide encoding a chimeric costimulating polypeptide, wherein the chimeric costimulating polypeptide comprises
   [1071] i) two FKBP12 v36 regions;
   [1072] ii) a MyD88 polypeptide region or a truncated MyD88 polypeptide region lacking the TIR domain; and
   [1073] iii) a CD40 cytoplasmic polypeptide region lacking the CD40 extracellular domain.

[1074] 12. The nucleic acid of any one of embodiments 8-11, wherein the order of regions (i), (ii), and (iii), from the amino terminus to the carboxyl terminus of the chimeric pro-apoptotic polypeptide is (iii), (ii), (i).

[1075] 13. The nucleic acid of any one of embodiments 8-11, wherein the order of regions (i), (ii), and (iii), from the amino terminus to the carboxyl terminus of the chimeric pro-apoptotic polypeptide is (ii), (iii), (i).

[1076] 14. The nucleic acid of any one of embodiments 8 to 13, further comprising linker polypeptides between regions (a), (b), and (c) of the chimeric pro-apoptotic polypeptide.

[1077] 15. The nucleic acid of any one of embodiments 8-14, wherein the nucleic acid further comprises a polynucleotide encoding a linker polypeptide between the first and second polynucleotides, wherein the linker polypeptide separates the translation products of the first and second polynucleotides during or after translation.

[1078] 16. The nucleic acid of embodiment 15, wherein the linker polypeptide that separates the translation products of the first and second polynucleotides is a 2A polypeptide.

[1079] 17. The nucleic acid of any one of embodiments 8-16, wherein the promoter is operably linked to the first polynucleotide and the second polynucleotide.

[1080] 17.1. The nucleic acid of any one of embodiments 8-17, further comprising a polynucleotide coding for a marker polypeptide.

[1081] 18. The nucleic acid of any one of embodiments 1-5, or 8-17.1, wherein the promoter is developmentally regulated.

[1082] 19. The nucleic acid of any one of embodiments 1-5, or 8-17.1, wherein the promoter is tissue-specific.

[1083] 20. The nucleic acid of any one of embodiments 1-5, or 8-19, wherein the promoter is activated in activated T cells.

[1084] 21. The nucleic acid of any one of embodiments 8-20, further comprising a third polynucleotide coding for a chimeric antigen receptor.

[1085] 22. The nucleic acid of embodiment 21, wherein the chimeric antigen receptor comprises (i) a transmembrane region, (ii) a T cell activation molecule, and (iii) an antigen recognition moiety.

[1086] 23. The nucleic acid of any one of embodiments 8-20, further comprising a third polynucleotide coding for a chimeric T cell receptor.

[1087] 24. The nucleic acid of any one of embodiments 21-23, further comprising polynucleotides encoding linker polypeptides between the first, second, and third polynucleotides, wherein the linker polypeptide separates the translation products of the first, second, and third polynucleotides during or after translation.

[1088] 25. The nucleic acid of embodiment 24, wherein the linker polypeptides that separate the translation products of the first, second, and third polynucleotides are 2A polypeptides.

[1089] 26. A modified cell transduced or transfected with a nucleic acid of any one of embodiments 8-25.

[1090] 27. A modified cell, comprising
[1091] a) a first polynucleotide encoding a chimeric pro-apoptotic polypeptide, wherein the chimeric pro-apoptotic polypeptide comprises
   [1092] i) a pro-apoptotic polypeptide region;
   [1093] ii) a FRB or FRB variant region; and
   [1094] iii) a FKBP12 polypeptide region; and
[1095] b) a second polynucleotide encoding a chimeric costimulating polypeptide, wherein the chimeric costimulating polypeptide comprises
   [1096] i) two FKBP12 variant regions;
   [1097] ii) a MyD88 polypeptide region or a truncated MyD88 polypeptide region lacking the TIR domain; and
   [1098] iii) a CD40 cytoplasmic polypeptide region lacking the CD40 extracellular domain.

[1099] 27.2. A modified cell, comprising
[1100] a) a first polynucleotide encoding a chimeric pro-apoptotic polypeptide, wherein the chimeric pro-apoptotic polypeptide comprises
   [1101] i) a pro-apoptotic polypeptide region;
   [1102] ii) a FRB or FRB variant region; and
   [1103] iii) a FKBP12 polypeptide region; and
[1104] b) a second polynucleotide encoding a chimeric costimulating polypeptide, wherein the chimeric costimulating polypeptide comprises
   [1105] i) two FKBP12 variant regions; and
   [1106] ii) a MyD88 polypeptide region or a truncated MyD88 polypeptide region lacking the TIR domain.

[1107] 28. The modified cell of any one of embodiments 27 and 27.5, wherein the FKBP12 variant regions bind to a ligand with at least 100 times less affinity than the ligand binds to the FKBP12 region.

[1108] 29. The modified cell of embodiment 27, wherein the FKBP12 variant regions bind to a ligand with at least 500 times less affinity than the ligand binds to the FKBP12 region.

[1109] 30. The modified cell of embodiment 27, wherein the FKBP12 variant regions bind to a ligand with at least 1000 times less affinity than the ligand binds to the FKBP12 region.

[1110] 31. The modified cell of any one of embodiments 27-30, wherein the FKBP12 variant regions are FKBP12v36 regions.

[1111] 31.1. The modified cell of embodiment 31, wherein the ligand is AP1903.

[1112] 32. A modified cell, comprising
[1113] a) a first polynucleotide encoding a chimeric pro-apoptotic polypeptide, wherein the chimeric pro-apoptotic polypeptide comprises
   [1114] i) a pro-apoptotic polypeptide region;
   [1115] ii) a FRB or FRB variant region; and
   [1116] iii) a FKBP12 polypeptide region; and
[1117] b) a second polynucleotide encoding a chimeric costimulating polypeptide, wherein the chimeric costimulating polypeptide comprises
   [1118] i) two FKBP12 v36 regions;
   [1119] ii) a MyD88 polypeptide region or a truncated MyD88 polypeptide region lacking the TIR domain; and
   [1120] iii) a CD40 cytoplasmic polypeptide region lacking the CD40 extracellular domain.

[1121] 33. The modified cell of any one of embodiments 27-32, wherein the order of regions (i), (ii), and (iii), from the amino terminus to the carboxyl terminus of the chimeric pro-apoptotic polypeptide is (iii), (ii), (i).

[1122] 34. The modified cell of any one of embodiments 27-32, wherein the order of regions (i), (ii), and (iii), from the amino terminus to the carboxyl terminus of the chimeric pro-apoptotic polypeptide is (ii), (iii), (i).

[1123] 35. The modified cell of any one of embodiments 27-34, further comprising linker polypeptides between regions (a), (b), and (c) of the chimeric pro-apoptotic polypeptide.

[1124] 36. The modified cell of any one of embodiments 26-35, wherein the cell further comprises a chimeric antigen receptor.

[1125] 37. The modified cell of embodiment 36, wherein the chimeric antigen receptor comprises (i) a transmembrane region, (ii) a T cell activation molecule, and (iii) an antigen recognition moiety.

[1126] 38. The modified cell of any one of embodiments 26-35, wherein the cell further comprises a chimeric T cell receptor.

[1127] 39. The modified cell of embodiment 7, or of embodiments A27-A56, wherein the cell is a T cell, tumor infiltrating lymphocyte, NK-T cell, or NK cell.

[1128] 40. The modified cell of embodiment 7, or of embodiments A27-A56, wherein the cell is a T cell.

[1129] 41. The modified cell of embodiment 7, or of embodiments A27-A56, wherein the cell is a primary T cell.

[1130] 42. The modified cell of embodiment 7, or of embodiments A27-A56, wherein the cell is a cytotoxic T cell.

[1131] 43. The modified cell of embodiment 7, or of embodiments A27-A56, wherein the cell is selected from the group consisting of embryonic stem cell (ESC), inducible pluripotent stem cell (iPSC), non-lymphocytic hematopoietic cell, non-hematopoietic cell, macrophage, keratinocyte, fibroblast, melanoma cell, tumor infiltrating lymphocyte, natural killer cell, natural killer T cell, or T cell.

[1132] 44. The modified cell of embodiment 7, or of embodiments A27-A56, wherein the T cell is a helper T cell.

[1133] 45. The modified cell of any one of embodiments 7, or 39-44, or of embodiments A27-A56, wherein the cell is obtained or prepared from bone marrow.

[1134] 46. The modified cell of any one of embodiments 7, or 39-44, or of embodiments A27-A56, wherein the cell is obtained or prepared from umbilical cord blood.

[1135] 47. The modified cell of any one of embodiments 7, or 39-44, or of embodiments A27-A56, wherein the cell is obtained or prepared from peripheral blood.

[1136] 48. The modified cell of any one of embodiments 7, or 39-44, or of embodiments A27-A56, wherein the cell is obtained or prepared from peripheral blood mononuclear cells.

[1137] 49. The modified cell of any one of embodiments 7, or 39-48, or of embodiments A27-A56, wherein the cell is a human cell.

[1138] 50. The modified cell of any one of embodiments 7, or 39-49, or of embodiments A27-A56, wherein the modified cell is transduced or transfected in vivo.

[1139] 51. The modified cell of any one of embodiments 7, or 39-50, or of embodiments A27-A56, wherein the cell is transfected or transduced by the nucleic acid vector using a method selected from the group consisting of electroporation, sonoporation, biolistics (e.g., Gene Gun with Au-particles), lipid transfection, polymer transfection, nanoparticles, or polyplexes.

[1140] 52. The modified cell of any one of embodiments 26-38, or of embodiments A27-A56, wherein the cell is a T cell, tumor infiltrating lymphocyte, NK-T cell, or NK cell.

[1141] 53. The modified cell of any one of embodiments 26-38, or of embodiments A27-A56, wherein the cell is a T cell.

[1142] 54. The modified cell of any one of embodiments 26-38, or of embodiments A27-A56, wherein the cell is a primary T cell.

[1143] 55. The modified cell of any one of embodiments 26-38, or of embodiments A27-A56, wherein the cell is a cytotoxic T cell.

[1144] 56. The modified cell of any one of embodiments 26-38, or of embodiments A27-A56, wherein the cell is selected from the group consisting of embryonic stem cell (ESC), inducible pluripotent stem cell (iPSC), non-lymphocytic hematopoietic cell, non-hematopoietic cell, macrophage, keratinocyte, fibroblast, melanoma cell, tumor infiltrating lymphocyte, natural killer cell, natural killer T cell, or T cell.

[1145] 57. The modified cell of any one of embodiments 26-38, or of embodiments A27-A56, wherein the T cell is a helper T cell.

[1146] 58. The modified cell of any one of embodiments 26-38, or 52-57, or of embodiments A27-A56, wherein the cell is obtained or prepared from bone marrow.

[1147] 59. The modified cell of any one of embodiments 26-38, or 52-57, or of embodiments A27-A56, wherein the cell is obtained or prepared from umbilical cord blood.

[1148] 60. The modified cell of any one of embodiments 26-38, or 52-57, or of embodiments A27-A56, wherein the cell is obtained or prepared from peripheral blood.

[1149] 61. The modified cell of any one of embodiments 26-38, or 52-57, or of embodiments A27-A56, wherein the cell is obtained or prepared from peripheral blood mononuclear cells.

[1150] 62. The modified cell of any one of embodiments 26-38, or 52-61, or of embodiments A27-A56, wherein the cell is a human cell.

[1151] 63. The modified cell of any one of embodiments 26-38, or 52-62, or of embodiments A27-A56, wherein the modified cell is transduced or transfected in vivo.

[1152] 64. The modified cell of any one of embodiments 26-38, or 52-63, or of embodiments A27-A56, wherein the cell is transfected or transduced by the nucleic acid vector using a method selected from the group consisting of electroporation, sonoporation, biolistics (e.g., Gene Gun with Au-particles), lipid transfection, polymer transfection, nanoparticles, or polyplexes.

[1153] 64.1. A modified cell, comprising
[1154] a) a first chimeric pro-apop the chimeric pro-apoptotic polypeptide comprises
   [1155] i) a pro-apoptotic polypeptide region;
   [1156] ii) a FRB or FRB variant region; and
   [1157] iii) a FKBP12 polypeptide region; and
[1158] b) a chimeric costimulating polypeptide, wherein the chimeric costimulating polypeptide comprises
   [1159] i) two FKBP12 variant regions;
   [1160] ii) a MyD88 polypeptide region or a truncated MyD88 polypeptide region lacking the TIR domain; and
   [1161] iii) a CD40 cytoplasmic polypeptide region lacking the CD40 extracellular domain.

[1162] 64.2. A modified cell, comprising
[1163] a) a first chimeric pro-apop the chimeric pro-apoptotic polypeptide comprises
   [1164] i) a pro-apoptotic polypeptide region;
   [1165] ii) a FRB or FRB variant region; and
   [1166] iii) a FKBP12 polypeptide region; and
[1167] b) a chimeric costimulating polypeptide, wherein the chimeric costimulating polypeptide comprises
   [1168] i) two FKBP12 variant regions; and
   [1169] ii) a MyD88 polypeptide region or a truncated MyD88 polypeptide region lacking the TIR domain.

[1170] 64.3. The modified cell of claim 64.1 or 64.2, comprising a first polynucleotide that encodes the first chimeric polypeptide and a second polynucleotide that encodes the second polypeptide.

[1171] 64.4. A kit or composition comprising nucleic acid comprising a first polynucleotide and a second polynucleotide, wherein
[1172] a) the first polynucleotide encodes a chimeric pro-apoptotic polypeptide, wherein the chimeric pro-apoptotic polypeptide comprises
   [1173] i) a pro-apoptotic polypeptide region;
   [1174] ii) a FRB or FRB variant region; and
   [1175] iii) a FKBP12 polypeptide region; and
[1176] b) the second polynucleotide encodes a chimeric costimulating polypeptide, wherein the chimeric costimulating polypeptide comprises
   [1177] i) two FKBP12 variant regions;
   [1178] ii) a MyD88 polypeptide region or a truncated MyD88 polypeptide region lacking the TIR domain; and
   [1179] iii) a CD40 cytoplasmic polypeptide region lacking the CD40 extracellular domain.

[1180] 65. The nucleic acid or cell of any one of embodiments 5, 7, or 17.1-64, or of embodiments A1-A56, wherein the marker polypeptide is a ΔCD19 polypeptide.

[1181] 66. The nucleic acid or cell of any one of embodiments 1-9, 12-31.1, or 33-65, wherein the FKBP12 variant region has an amino acid substitution at position 36 selected from the group consisting of valine, leucine, isoleuceine and alanine.

[1182] 67. The nucleic acid or cell of embodiment 66, wherein FKBP variant region is an FKBP12v36 region.

[1183] 68. The nucleic acid or cell of any one of embodiments 1-67, wherein the FRB variant region is selected from the group consisting of KLW (T2098L), KTF (W2101F), and KLF (T2098L, W2101F).

[1184] 69. The nucleic acid or cell of any one of embodiments 1-67, wherein the FRB variant region is FRB_{L}

[1185] 70. The nucleic acid or cell of any one of embodiments 1-69, wherein the FRB variant region binds to a rapalog selected from the group consisting of S-o,p-dimethoxyphenyl (DMOP)-rapamycin, R-Isopropoxyrapamycin, and S-Butanesulfonamidorap.

[1186] 71. The nucleic acid or cell of any one of embodiments 1-70, wherein the pro-apoptotic polypeptide is selected from the group consisting of caspase 1, 2, 3, 4, 5, 6, 7, 8, 9, 10, 11, 12, 13, or 14, FADD (DED), APAF1 (CARD), CRADD/RAIDD CARD), ASC (CARD), Bax, Bak, Bcl-xL, Bcl-2, RIPK3, and RIPK1-RHIM.

[1187] 72. The nucleic acid or cell of any one of embodiments 1-71, wherein the pro-apoptotic polypeptide is a caspase polypeptide.

[1188] 73. The nucleic acid or cell of embodiment 84, wherein the pro-apoptotic polypeptide is a Caspase-9 polypeptide.

[1189] 74. The nucleic acid of cell of embodiment 73, wherein the Caspase-9 polypeptide lacks the CARD domain.

[1190] 75. The nucleic acid or cell of any one of embodiments 73 or 74, wherein the caspase polypeptide comprises the amino acid sequence of SEQ ID NO: 300.

[1191] 76. The nucleic acid or cell of any one of embodiments 73 or 74, wherein the caspase polypeptide is a modified Caspase-9 polypeptide comprising an amino acid substitution selected from the group consisting of the catalytically active caspase variants in Tables 5 or 6.

[1192] 77. The nucleic acid or cell of embodiment 76, wherein the caspase polypeptide is a modified Caspase-9 polypeptide comprising an amino acid sequence selected from the group consisting of D330A, D330E, and N405Q.

[1193] 78. The nucleic acid or cell of any one of embodiments 8-38, or 52-77, wherein the truncated MyD88 polypeptide has the amino acid sequence of SEQ ID NO: 214, or a functional fragment thereof.

[1194] 79. The nucleic acid or cell of any one of embodiments 8-38, or 52-77, wherein the MyD88 polypeptide has the amino acid sequence of SEQ ID NO: 282, or a functional fragment thereof.

[1195] 80. The nucleic acid or cell of any one of embodiments 8-38, or 52-77, wherein the cytoplasmic CD40 polypeptide has the amino acid sequence of SEQ ID NO: 216, or a functional fragment thereof.

[1196] 81. The nucleic acid or cell of any one of embodiments 23, 26, 38, or 52-64, wherein the T cell receptor binds to an antigenic polypeptide selected from the group consisting of PRAME, Bob-1, and NY-ESO-1.

[1197] 82. The nucleic acid or cell of any one of embodiments 22, 26, 37, or 52-80, wherein the antigen recognition moiety binds to an antigen selected from the group consisting of an antigen on a tumor cell, an antigen on a cell involved in a hyperproliferative disease, a viral antigen, a bacterial antigen, CD19, PSCA, Her2/Neu, PSMA, Muc1Muc1, Muc1, ROR1, Mesothelin, GD2, CD123, Muc16, CD33, CD38, and CD44v6.

[1198] 83. The nucleic acid or cell of any one of embodiments 22, 26, 37, 52-80, or 82, wherein the T cell activation molecule is selected from the group consisting of an ITAM-containing, Signal 1 conferring molecule, a CD3 Z polypeptide, and an Fc epsilon receptor gamma (FcεR1γ) subunit polypeptide.

[1199] 84. The nucleic acid or cell of any one of embodiments 22, 26, 37, 52-80, or 82-83, wherein the antigen recognition moiety is a single chain variable fragment.

[1200] 85. The nucleic acid or cell of any one of embodiments 22, 26, 37, 52-80, or 82-84, wherein the transmembrane region is a CD8 transmembrane region.

[1201] 86. The nucleic acid of any one of embodiments 1-5, 8-25, or 65-85, wherein the nucleic acid is contained within a viral vector.

[1202] 87. The nucleic acid of embodiment 86, wherein the viral vector is selected from the group consisting of retroviral vector, murine leukemia virus vector, SFG vector, adenoviral vector, lentiviral vector, adeno-associated virus (AAV), Herpes virus, and Vaccinia virus.

[1203] 88. The nucleic acid of any one of embodiments 1-5, 8-25, or 65-87, wherein the nucleic acid is prepared or in a vector designed for electroporation, sonoporation, or biolistics, or is attached to or incorporated in chemical lipids, polymers, inorganic nanoparticles, or polyplexes.

[1204] 89. The nucleic acid of any one of embodiments 1-5 8-25, or 65-85, wherein the nucleic acid is contained within a plasmid.

[1205] 90. The nucleic acid or cell of any one of embodiments 1-89, comprising a polynucleotide coding for a polypeptide provided in the tables of Examples 23 or 25. 91. The nucleic acid or cell of any one of embodiments 1-89, comprising a polynucleotide coding for a polypeptide provided in the tables of Examples 23 or 25 selected from group consisting of FKBPv36, FpK′, FpK, Fv, Fv′, FKBPpK′, FKBPpK″, and FKBPpK″.

[1206] 92. The nucleic acid or cell of any one of embodiments 1-89, comprising a polynucleotide coding for a polypeptide provided in the tables of Examples 23 or 25 selected from group consisting of FRP5-VL, FRP5-VH, FMC63-VL, and FMC63-VH. 93. The nucleic acid or cell of any one of embodiments 1-89, comprising a polynucleotide coding for FRP5-VL and FRP5-VH.

[1207] 94. The nucleic acid or cell of any one of embodiments 1-89, comprising a polynucleotide coding for FMC63-VL and FMC63-VH.

[1208] 95. The nucleic acid or cell of any one of embodiments 1-89, comprising a polynucleotide coding for a polypeptide provided in the tables of Examples 23 or 25 selected from group consisting of MyD88L and MyD88.

[1209] 96. The nucleic acid or cell of any one of embodiments 1-89, comprising a polynucleotide coding for a ΔCaspase-9 polypeptide provided in the tables of Examples 23 or 25.

[1210] 97. The nucleic acid or cell of any one of embodiments 1-89, comprising a polynucleotide coding for a ΔCD18 polypeptide provided in the tables of Examples 23 or 25.

[1211] 98. The nucleic acid or cell of any one of embodiments 1-89, comprising a polynucleotide coding for a hCD40 polypeptide provided in the tables of Examples 23 or 25.

[1212] 99. The nucleic acid or cell of any one of embodiments 1-89, comprising a polynucleotide coding for a CD3 zeta polypeptide provided in the tables of Examples 23 or 25.

[1213] 100. Reserved.

[1214] 101. A method of stimulating an immune response in a subject, comprising:
[1215] a) transplanting modified cells of any one of embodiments A27-A56, 26-38, or 52-85 into the subject, and
[1216] b) after (a), administering an effective amount of a ligand that binds to the FKBP12 variant region of the chimeric costimulating polypeptide to stimulate a cell mediated immune response.

[1217] 102. A method of administering a ligand to a human subject who has undergone cell therapy using modified cells, comprising administering a ligand that binds to the FKBP variant region of the chimeric costimulating polypeptide to the human subject, wherein the modified cells comprise modified cells of any one of embodiments A27-A56, 26-38, or 52-85.

[1218] 103. A method of controlling activity of transplanted modified cells in a subject, comprising:
[1219] a) transplanting a modified cell of any one of embodiments A27-A56, 26-38, or 52-85; and
[1220] b) after (a), administering an effective amount of a ligand that binds to the FKBP12 variant region of the chimeric costimulating polypeptide to stimulate the activity of the transplanted modified cells.

[1221] 104. A method for treating a subject having a disease or condition associated with an elevated expression of a target antigen expressed by a target cell, comprising
[1222] (a) transplanting an effective amount of modified cells into the subject; wherein the modified cells comprise a modified cell of any one of embodiments A27-A56, 26-38, or 52-85, wherein the modified cell comprises a chimeric antigen receptor comprising an antigen recognition moiety that binds to the target antigen, and
[1223] (b) after a), administering an effective amount of a ligand that binds to the FKBP12 variant region of the chimeric costimulating polypeptide to reduce the number or concentration of target antigen or target cells in the subject.

[1224] 105. The method of embodiment 104, wherein the target antigen is a tumor antigen.

[1225] 106. A method for treating a subject having a disease or condition associated with an elevated expression of a target antigen expressed by a target cell, comprising
[1226] (a) administering to the subject an effective amount of modified cells, wherein the modified cells comprise a modified cell of any one of embodiments A27-A56, 26-38, or 52-85, wherein the modified cell comprises a chimeric T cell receptor that recognizes and binds to the target antigen, and
[1227] (b) after a), administering an effective amount of a ligand that binds to the FKBP12 variant region of the chimeric costimulating polypeptide to reduce the number or concentration of target antigen or target cells in the subject.

[1228] 107. A method for reducing the size of a tumor in a subject, comprising
[1229] a) administering a modified cell of any one of embodiments A27-A56, 26-38, or 52-85 to the subject, wherein the cell comprises a chimeric antigen receptor comprising an antigen recognition moiety that binds to an antigen on the tumor; and
[1230] b) after a), administering an effective amount of a ligand that binds to the FKBP12 variant region of the chimeric costimulating polypeptide to reduce the size of the tumor in the subject.

[1231] 108. The method of any one of embodiments 104-107, comprising measuring the number or concentration of target cells in a first sample obtained from the subject before administering second ligand, measuring the number or concentration of target cells in a second sample obtained from the subject after administering the ligand, and determining an increase or decrease of the number or concentration of target cells in the second sample compared to the number or concentration of target cells in the first sample.

[1232] 109. The method of embodiment 108, wherein the concentration of target cells in the second sample is decreased compared to the concentration of target cells in the first sample.

[1233] 110. The method of embodiment 108, wherein the concentration of target cells in the second sample is increased compared to the concentration of target cells in the first sample.

[1234] 111. The method of any one of embodiments 101-110, wherein the subject has received a stem cell transplant before or at the same time as administration of the modified cells.

[1235] 112. The method of any one of embodiments 101-111, wherein at least 1×10⁶ transduced or transfected modified cells are administered to the subject.

[1236] 113. The method of any one of embodiments 101-111, wherein at least 1×10⁷ transduced or transfected modified cells are administered to the subject.

[1237] 114. The method of any one of embodiments 101-111, wherein at least 1×10⁸ modified cells are administered to the subject.

[1238] 114.1. The method of any one of embodiments 101-114, wherein the FKBP12 variant region is FKBP12v36 and the ligand that binds to the FKBP12 variant region is AP1903.

[1239] 115. A method of controlling survival of transplanted modified cells in a subject, comprising
[1240] a) transplanting modified cells of any one of embodiments A27-A56, 26-38, 52-64, or 65-85 into the subject, and
[1241] b) after (a), administering to the subject rapamycin or a rapalog that binds to the FRB or FRB variant region of the chimeric pro-apoptotic polypeptide in an amount effective to kill less than 30% of the modified cells that express the chimeric pro-apoptotic polypeptide.

[1242] 116. The method of any one of embodiments 101-114.1, further comprising after (b), administering to the subject rapamycin or a rapalog that binds to the FRB variant region of the chimeric pro-apoptotic polypeptide in an amount effective to kill less than 30% of the modified cells that express the chimeric pro-apoptotic polypeptide.

[1243] 116.1. the method of embodiment 116, wherein the rapamycin or rapalog is administered in an amount effective to kill at least 30% of the modified cells that express the chimeric pro-apoptotic polypeptide.

[1244] 117. The method of any one of embodiments 115 or 116, wherein the rapamycin or rapalog is administered in an amount effective to kill less than 40% of the modified cells that express the chimeric pro-apoptotic polypeptide.

[1245] 118. The method of any one of embodiments 115 or 116, wherein the rapamycin or rapalog is administered in an amount effective to kill less than 50% of the modified cells that express the chimeric pro-apoptotic polypeptide.

[1246] 119. The method of any one of embodiments 115 or 116, wherein the rapamycin or rapalog is administered in an amount effective to kill less than 60% of the modified cells that express the chimeric pro-apoptotic polypeptide.

[1247] 120. The method of any one of embodiments 115 or 116, wherein the rapamycin or rapalog is administered in an amount effective to kill less than 70% of the modified cells that express the chimeric pro-apoptotic polypeptide.

[1248] 121. The method of any one of embodiments 115 or 116, wherein the rapamycin or rapalog is administered in an amount effective to kill less than 90% of the modified cells that express the chimeric pro-apoptotic polypeptide.

[1249] 122. The method of any one of embodiments 115 or 116, wherein the rapamycin or rapalog is administered in an amount effective to kill at least 90% of the modified cells that express the chimeric pro-apoptotic polypeptide.

[1250] 123. The method of any one of embodiments 115 or 116, wherein the rapamycin or rapalog is administered in an amount effective to kill at least 95% of the modified cells that express the chimeric pro-apoptotic polypeptide.

[1251] 124. The method of any one of embodiments 115-116, wherein the chimeric pro-apoptotic polypeptide comprises a FRB_{L} region.

[1252] 125. The method of any one of embodiments 101-114.1, wherein more than one dose of the ligand is administered to the subject.

[1253] 126. The method of any one of embodiments 115-125, wherein more than one dose of the rapamycin or rapalog is administered to the subject.

[1254] 127. The method of any one of embodiments 101-125, further comprising identifying a presence or absence of a condition in the subject that requires the removal of the modified cells from the subject; and administering rapamycin or a rapalog, maintaining a subsequent dosage of rapamycin or the rapalog, or adjusting a subsequent dosage of the rapamycin or the rapalog to the subject based on the presence or absence of the condition identified in the subject.

[1255] 128. The method of any one of embodiments 101-125, further comprising receiving information comprising presence or absence of a condition in the subject that requires the removal of the modified cells from the subject; and administering the rapamycin or rapalog, maintaining a subsequent dosage of rapamycin or the rapalog, or adjusting a subsequent dosage of rapamycin or the rapalog to the subject based on the presence or absence of the condition identified in the subject.

[1256] 129. The method of any one of embodiments 101-125, further comprising identifying a presence or absence of a condition in the subject that requires the removal of the modified cells from the subject; and transmitting the presence, absence or stage of the condition identified in the subject to a decision maker who administers rapamycin or the rapalog, maintains a subsequent dosage of the rapamycin or the rapalog, or adjusts a subsequent dosage of the rapamycin or the rapalog administered to the subject based on the presence, absence or stage of the condition identified in the subject.

[1257] 130. The method of any one of embodiments 101-125, further comprising identifying a presence or absence of a condition in the subject that requires the removal of the modified cells from the subject; and transmitting an indication to administer the rapamycin or the rapalog, maintain a subsequent dosage of the rapamycin or the rapalog, or adjust a subsequent dosage of the rapamycin or the rapalog administered to the subject based on the presence, absence or stage of the condition identified in the subject.

[1258] 131. The method of any one of embodiments 101-130, wherein the subject has cancer.

[1259] 132. The method of any one of embodiments 101-131, wherein the modified cell is delivered to a tumor bed.

[1260] 133. The method of any one of embodiments 131 or 132, wherein the cancer is present in the blood or bone marrow of the subject.

[1261] 134. The method of any one of embodiments 101-130, wherein the subject has a blood or bone marrow disease.

[1262] 135. The method of any one of embodiments 101-130, wherein the subject has been diagnosed with sickle cell anemia or metachromatic leukodystrophy.

[1263] 136. The method of any one of embodiments 101-130, wherein the patient has been diagnosed with a condition selected from the group consisting of a primary immune deficiency condition, hemophagocytosis lymphohistiocytosis (HLH) or other hemophagocytic condition, an inherited marrow failure condition, a hemoglobinopathy, a metabolic condition, and an osteoclast condition.

[1264] 137. The method of any one of embodiments 101-130, wherein the patient has been diagnosed with a disease or condition selected from the group consisting of Severe Combined Immune Deficiency (SCID), Combined Immune Deficiency (CID), Congenital T-cell Defect/Deficiency, Common Variable Immune Deficiency (CVID), Chronic Granulomatous Disease, IPEX (Immune deficiency, polyendocrinopathy, enteropathy, X-linked) or IPEX-like, Wiskott-Aldrich Syndrome, CD40 Ligand Deficiency, Leukocyte Adhesion Deficiency, DOCA 8 Deficiency, IL-10 Deficiency/IL-10 Receptor Deficiency, GATA 2 deficiency, X-linked lymphoproliferative disease (XLP), Cartilage Hair Hypoplasia, Shwachman Diamond Syndrome, Diamond Blackfan Anemia, Dyskeratosis Congenita, Fanconi Anemia, Congenital Neutropenia, Sickle Cell Disease, Thalassemia, Mucopolysaccharidosis, Sphingolipidoses, and Osteopetrosis.

[1265] 138. A method for expressing a chimeric pro-apoptotic polypeptide, wherein the chimeric pro-apoptotic polypeptide comprises
[1266] a) a pro-apoptotic polypeptide region;
[1267] b) a FRB or FRB variant region; and
[1268] c) a FKBP12 polypeptide region,

[1269] comprising contacting a nucleic acid of any one of embodiments 1-6 with a cell under conditions in which the nucleic acid is incorporated into the cell, whereby the cell expresses the first and second chimeric polypeptides from the incorporated nucleic acid.

[1270] 139. The method of embodiment 138, wherein the nucleic acid is contacted with the cell ex vivo.

[1271] 140. The method of embodiment 138, wherein the nucleic acid is contacted with the cell in vivo. 141-200. Reserved.

[1272] 201. A nucleic acid comprising a promoter operably linked to a polynucleotide coding for a chimeric costimulating polypeptide wherein the chimeric costimulating polypeptide comprises
[1273] a) a costimulating polypeptide region comprising
   [1274] i) a MyD88 polypeptide region or a truncated MyD88 polypeptide region lacking the TIR domain; and
   [1275] ii) a CD40 cytoplasmic polypeptide region lacking the CD40 extracellular domain;
[1276] b) a FRB or FRB variant region; and
[1277] c) a FKBP12 polypeptide region.

[1278] 202. The nucleic acid of embodiment 201, wherein the order of regions (a), (b), and (c), from the amino terminus to the carboxyl terminus of the chimeric costimulating polypeptide is (c), (b), (a).

[1279] 203. The nucleic acid of embodiment 201, wherein the order of regions (a), (b), and (c), from the amino terminus to the carboxyl terminus of the chimeric costimulating polypeptide is (b), (c), (a).

[1280] 204. The nucleic acid of any one of embodiments 201 to 203, further comprising linker polypeptides between regions (a), (b), and (c) of the chimeric costimulating polypeptide.

[1281] 205. The nucleic acid of any one of embodiments 201-204, further comprising a polynucleotide coding for a marker polypeptide.

[1282] 206. A polypeptide encoded by a nucleic acid of any one of embodiments 201 to 205.

[1283] 207. A modified cell transfected or transduced with a nucleic acid of any one of embodiments 201 to 205.

[1284] 208. A nucleic acid comprising a promoter operably linked to a first polynucleotide encoding a chimeric costimulating polypeptide, comprising
[1285] a) a costimulating polypeptide region comprising
   [1286] i) a MyD88 polypeptide region or a truncated MyD88 polypeptide region lacking the TIR domain; and
   [1287] ii) a CD40 cytoplasmic polypeptide region lacking the CD40 extracellular domain;
[1288] b) a FRB or FRB variant region; and
[1289] c) a FKBP12 polypeptide region; and
   a second polynucleotide encoding a chimeric pro-apoptotic polypeptide, wherein the chimeric pro-apoptotic polypeptide comprises
[1290] d) two FKBP12 variant regions; and
[1291] e) a pro-apoptotic polypeptide region.

[1292] 208.2. A nucleic acid comprising a promoter operably linked to a first polynucleotide encoding a chimeric costimulating polypeptide, comprising
[1293] a) a costimulating polypeptide region comprising a MyD88 polypeptide region or a truncated MyD88 polypeptide region lacking the TIR domain;
[1294] b) a FRB or FRB variant region; and
[1295] c) a FKBP12 polypeptide region; and
   a second polynucleotide encoding a chimeric pro-apoptotic polypeptide, wherein the chimeric pro-apoptotic polypeptide comprises
[1296] d) two FKBP12 variant regions; and
[1297] e) a pro-apoptotic polypeptide region.

[1298] 209. The nucleic acid of embodiment 208, wherein the FKBP12 variant regions bind to a ligand with at least 100 times less affinity than the ligand binds to the FKBP12 region.

[1299] 209.1. The nucleic acid of embodiment 208, wherein the FKBP12 variant regions bind to a ligand with at least 500 times less affinity than the ligand binds to the FKBP12 region.

[1300] 209.2. The nucleic acid of embodiment 208, wherein the FKBP12 variant regions bind to a ligand with at least 1000 times less affinity than the ligand binds to the FKBP12 region.

[1301] 210. The nucleic acid of embodiment 208, wherein the FKBP12 variant regions are FKBP12v36 regions.

[1302] 211. A nucleic acid comprising a promoter operably linked to a first polynucleotide encoding a chimeric costimulating polypeptide, comprising
[1303] a) a costimulating polypeptide region comprising
   [1304] i) a MyD88 polypeptide region or a truncated MyD88 polypeptide region lacking the TIR domain; and
   [1305] ii) a CD40 cytoplasmic polypeptide region lacking the CD40 extracellular domain;
[1306] b) a FRB or FRB variant region; and
[1307] c) a FKBP12 polypeptide region; and
   a second polynucleotide encoding a chimeric pro-apoptotic polypeptide, wherein the chimeric pro-apoptotic polypeptide comprises
[1308] d) two FKBP12v36 regions; and
[1309] e) a pro-apoptotic polypeptide region.

[1310] 212. The nucleic acid of any one of embodiments 208-211, wherein the order of regions (a), (b), and (c), from the amino terminus to the carboxyl terminus of the chimeric costimulating polypeptide is (c), (b), (a).

[1311] 213. The nucleic acid of any one of embodiments 208-211, wherein the order of regions (a), (b), and (c), from the amino terminus to the carboxyl terminus of the chimeric costimulating polypeptide is (b), (c), (a).

[1312] 214. The nucleic acid of any one of embodiments 208 to 213, further comprising linker polypeptides between regions (a), (b), and (c) of the chimeric costimulating polypeptide.

[1313] 215. The nucleic acid of any one of embodiments 208-214, wherein the nucleic acid further comprises a polynucleotide encoding a linker polypeptide between the first and second polynucleotides, wherein the linker polypeptide separates the translation products of the first and second polynucleotides during or after translation.

[1314] 216. The nucleic acid of embodiment 215, wherein the linker polypeptide that separates the translation products of the first and second polynucleotides is a 2A polypeptide.

[1315] 217. The nucleic acid of any one of embodiments 208-216, wherein the promoter is operably linked to the first polynucleotide and the second polynucleotide.

[1316] 217.1. The nucleic acid of any one of embodiments 208-217, further comprising a polynucleotide coding for a marker polypeptide.

[1317] 218. The nucleic acid of any one of embodiments 201-205, or 208-217.1, wherein the promoter is developmentally regulated.

[1318] 219. The nucleic acid of any one of embodiments 201-205, or 208-217.1, wherein the promoter is tissue-specific.

[1319] 220. The nucleic acid of any one of embodiments 201-205, or 208-219, wherein the promoter is activated in activated T cells.

[1320] 221. The nucleic acid of any one of embodiments 208-220, further comprising a third polynucleotide coding for a chimeric antigen receptor.

[1321] 222. The nucleic acid of embodiment 21, wherein the chimeric antigen receptor comprises (i) a transmembrane region, (ii) a T cell activation molecule, and (iii) an antigen recognition moiety.

[1322] 223. The nucleic acid of any one of embodiments 208-220, further comprising a third polynucleotide coding for a chimeric T cell receptor.

[1323] 224. The nucleic acid of any one of embodiments 221-223, further comprising polynucleotides encoding linker polypeptides between the first, second, and third polynucleotides, wherein the linker polypeptides separate the translation products of the first and second polynucleotides during or after translation.

[1324] 225. The nucleic acid of embodiment 224, wherein the linker polypeptide that separates the translation products of the first, second, and third polynucleotides is a 2A polypeptide.

[1325] 226. A modified cell transduced or transfected with a nucleic acid of any one of embodiments 208-225.

[1326] 227. A modified cell, comprising a first polynucleotide encoding a chimeric costimulating polypeptide, comprising
[1327] a) a costimulating polypeptide region comprising
   [1328] i) a MyD88 polypeptide region or a truncated MyD88 polypeptide region lacking the TIR domain; and
   [1329] ii) a CD40 cytoplasmic polypeptide region lacking the CD40 extracellular domain;
[1330] b) a FRB or FRB variant region; and
[1331] c) a FKBP12 polypeptide region; and
   a second polynucleotide encoding a chimeric pro-apoptotic polypeptide, wherein the chimeric pro-apoptotic polypeptide comprises
[1332] d) two FKBP12 variant regions;
[1333] e) a pro-apoptotic polypeptide region.

[1334] 228. The modified cell of embodiment 227, wherein the FKBP12 variant regions bind to a ligand with at least 100 times less affinity than the ligand binds to the FKBP12 region.

[1335] 229. The modified cell of embodiment 227, wherein the FKBP12 variant regions bind to a ligand with at least 500 times less affinity than the ligand binds to the FKBP12 region.

[1336] 230. The modified cell of embodiment 227, wherein the FKBP12 variant regions bind to a ligand with at least 1000 times less affinity than the ligand binds to the FKBP12 region.

[1337] 231. The modified cell of any one of embodiments 227-230, wherein the FKBP12 variant regions are FKBP12v36 regions.

[1338] 231.1. The modified cell of embodiment 231, wherein the ligand is AP1903.

[1339] 232. A modified cell, comprising a first polynucleotide encoding a chimeric costimulating polypeptide, comprising
[1340] a) a costimulating polypeptide region comprising
   [1341] i) a MyD88 polypeptide region or a truncated MyD88 polypeptide region lacking the TIR domain; and
   [1342] ii) a CD40 cytoplasmic polypeptide region lacking the CD40 extracellular domain;
[1343] b) a FRB or FRB variant region; and
[1344] c) a FKBP12 polypeptide region; and
   a second polynucleotide encoding a chimeric pro-apoptotic polypeptide, wherein the chimeric pro-apoptotic polypeptide comprises
[1345] d) two FKBP12 v36 regions;
[1346] e) a pro-apoptotic polypeptide region.

[1347] 233. The modified cell of any one of embodiment 227-232, wherein the order of regions (a), (b), and (c), from the amino terminus to the carboxyl terminus of the chimeric costimulating polypeptide is (c), (b), (a).

[1348] 234. The modified cell of any one of embodiment 227-232, wherein the order of regions (a), (b), and (c), from the amino terminus to the carboxyl terminus of the chimeric costimulating polypeptide is (b), (c), (a).

[1349] 235. The modified cell of any one of embodiment 227-235, further comprising linker polypeptides between regions (a), (b), and (c) of the chimeric costimulating polypeptide.

[1350] 236. The modified cell of any one of embodiment 226-234, wherein the cell further comprises a chimeric antigen receptor.

[1351] 237. The modified cell of embodiment 236, wherein the chimeric antigen receptor comprises (i) a transmembrane region, (ii) a T cell activation molecule, and (iii) an antigen recognition moiety.

[1352] 238. The modified cell of any one of embodiment 226-235, wherein the cell further comprises a chimeric T cell receptor.

[1353] 239. The modified cell of embodiment 207, wherein the cell is a T cell, tumor infiltrating lymphocyte, NK-T cell, or NK cell.

[1354] 240. The modified cell of embodiment 207, wherein the cell is a T cell.

[1355] 241. The modified cell of embodiment 207, wherein the cell is a primary T cell.

[1356] 242. The modified cell of embodiment 207, wherein the cell is a cytotoxic T cell.

[1357] 243. The modified cell of embodiment 207, wherein the cell is selected from the group consisting of embryonic stem cell (ESC), inducible pluripotent stem cell (iPSC), non-lymphocytic hematopoietic cell, non-hematopoietic cell, macrophage, keratinocyte, fibroblast, melanoma cell, tumor infiltrating lymphocyte, natural killer cell, natural killer T cell, or T cell.

[1358] 244. The modified cell of embodiment 207, wherein the T cell is a helper T cell.

[1359] 245. The modified cell of any one of embodiments 207, or 239-244, wherein the cell is obtained or prepared from bone marrow.

[1360] 246. The modified cell of any one of embodiments 207, or 239-244, wherein the cell is obtained or prepared from umbilical cord blood.

[1361] 247. The modified cell of any one of embodiments 207, or 239-244, wherein the cell is obtained or prepared from peripheral blood.

[1362] 248. The modified cell of any one of embodiments 207, or 239-244, wherein the cell is obtained or prepared from peripheral blood mononuclear cells.

[1363] 249. The modified cell of any one of embodiments 207, or 239-248, wherein the cell is a human cell.

[1364] 250. The modified cell of any one of embodiments 207, or 239-249, wherein the modified cell is transduced or transfected in vivo.

[1365] 251. The modified cell of any one of embodiments 207, or 239-250, wherein the cell is transfected or transduced by the nucleic acid vector using a method selected from the group consisting of electroporation, sonoporation, biolistics (e.g., Gene Gun with Au-particles), lipid transfection, polymer transfection, nanoparticles, or polyplexes.

[1366] 252. The modified cell of any one of embodiment 226-238, wherein the cell is a T cell, tumor infiltrating lymphocyte, NK-T cell, or NK cell.

[1367] 253. The modified cell of any one of embodiment 226-238, wherein the cell is a T cell.

[1368] 254. The modified cell of any one of embodiment 226-238, wherein the cell is a primary T cell.

[1369] 255. The modified cell of any one of embodiment 226-238, wherein the cell is a cytotoxic T cell.

[1370] 256. The modified cell of any one of embodiment 226-238, wherein the cell is selected from the group consisting of embryonic stem cell (ESC), inducible pluripotent stem cell (iPSC), non-lymphocytic hematopoietic cell, non-hematopoietic cell, macrophage, keratinocyte, fibroblast, melanoma cell, tumor infiltrating lymphocyte, natural killer cell, natural killer T cell, or T cell.

[1371] 257. The modified cell of any one of embodiment 226-238, wherein the T cell is a helper T cell.

[1372] 258. The modified cell of any one of embodiment 226-238, or 252-257, wherein the cell is obtained or prepared from bone marrow.

[1373] 259. The modified cell of any one of embodiment 226-238, or 252-257, wherein the cell is obtained or prepared from umbilical cord blood.

[1374] 260. The modified cell of any one of embodiment 226-238, or 252-257, wherein the cell is obtained or prepared from peripheral blood.

[1375] 261. The modified cell of any one of embodiment 226-238, or 252-257, wherein the cell is obtained or prepared from peripheral blood mononuclear cells.

[1376] 262. The modified cell of any one of embodiment 226-238, or 252-261, wherein the cell is a human cell.

[1377] 263. The modified cell of any one of embodiment 226-238, or 252-262, wherein the modified cell is transduced or transfected in vivo.

[1378] 264. The modified cell of any one of embodiment 226-238, or 252-263, wherein the cell is transfected or transduced by the nucleic acid vector using a method selected from the group consisting of electroporation, sonoporation, biolistics (e.g., Gene Gun with Au-particles), lipid transfection, polymer transfection, nanoparticles, or polyplexes.

[1379] 264.1. A modified cell, comprising
[1380] a) a first polynucleotide encoding a chimeric costimulating polypeptide, comprising a costimulating polypeptide region comprising
   [1381] i) a MyD88 polypeptide region or a truncated MyD88 polypeptide region lacking the TIR domain; and
   [1382] ii) a CD40 cytoplasmic polypeptide region lacking the CD40 extracellular domain;
      a FRB or FRB variant region; and
      a FKBP12 polypeptide region; and
[1383] b) a second polynucleotide encoding a chimeric pro-apoptotic polypeptide,
   wherein the chimeric pro-apoptotic polypeptide comprises two FKBP12 variant regions;
   and a pro-apoptotic polypeptide region.

[1384] 264.2. The modified cell of claim 264.1, comprising a first polynucleotide that encodes the first chimeric polypeptide and a second polynucleotide that encodes the second polypeptide.

[1385] 264.3. A kit or composition comprising nucleic acid comprising a first polynucleotide and a second polynucleotide, wherein
[1386] the first polynucleotide encodes a chimeric costimulating polypeptide, comprising
   [1387] a) a costimulating polypeptide region comprising
      [1388] i) a MyD88 polypeptide region or a truncated MyD88 polypeptide region lacking the TIR domain; and
      [1389] ii) a CD40 cytoplasmic polypeptide region lacking the CD40 extracellular domain;
   [1390] b) a FRB or FRB variant region; and
   [1391] c) a FKBP12 polypeptide region; and
[1392] the second polynucleotide encodes a chimeric pro-apoptotic polypeptide, wherein the chimeric pro-apoptotic polypeptide comprises
   [1393] a) two FKBP12 variant regions; and
   [1394] b) a pro-apoptotic polypeptide region.

[1395] 265. The nucleic acid or cell of any one of embodiments 205, 207, or 217.1-264, wherein the marker polypeptide is a ΔCD19 polypeptide.

[1396] 266. The nucleic acid or cell of any one of embodiments 102-109, 212-231.1, or 233-265, wherein the FKBP12 variant region has an amino acid substitution at position 36 selected from the group consisting of valine, leucine, isoleuceine and alanine.

[1397] 267. The nucleic acid or cell of embodiment 266, wherein FKBP variant region is an FKBP12v36 region.

[1398] 268. The nucleic acid or cell of any one of embodiments 201-267, wherein the FRB variant region is selected from the group consisting of KLW (T2098L), KTF (W2101F), and KLF (T2098L, W2101F).

[1399] 269. The nucleic acid or cell of any one of embodiments 201-267, wherein the FRB variant region is FRB_{L}

[1400] 270. The nucleic acid or cell of any one of embodiments 201-269, wherein the FRB variant region binds to a rapalog selected from the group consisting of S-o,p-dimethoxyphenyl (DMOP)-rapamycin, R-Isopropoxyrapamycin, and S-Butanesulfonamidorap.

[1401] 271. The nucleic acid or cell of any one of embodiments 201-270, wherein the pro-apoptotic polypeptide is selected from the group consisting of caspase 1, 2, 3, 4, 5, 6, 7, 8, 9, 10, 11, 12, 13, or 14, FADD (DED), APAF1 (CARD), CRADD/RAIDD CARD), ASC (CARD), Bax, Bak, Bcl-XL, Bcl-2, RIPK3, and RIPK1-RHIM.

[1402] 272. The nucleic acid or cell of any one of embodiments 208-271, wherein the pro-apoptotic polypeptide is a caspase polypeptide.

[1403] 273. The nucleic acid or cell of embodiment 284, wherein the pro-apoptotic polypeptide is a Caspase-9 polypeptide.

[1404] 274. The nucleic acid of cell of embodiment 273, wherein the Caspase-9 polypeptide lacks the CARD domain.

[1405] 275. The nucleic acid or cell of any one of embodiments 273 or 274, wherein the caspase polypeptide comprises the amino acid sequence of SEQ ID NO: 300.

[1406] 276. The nucleic acid or cell of any one of embodiments 273 or 274, wherein the caspase polypeptide is a modified Caspase-9 polypeptide comprising an amino acid substitution selected from the group consisting of the catalytically active caspase variants in Tables 5 or 6.

[1407] 277. The nucleic acid or cell of embodiment 276, wherein the caspase polypeptide is a modified Caspase-9 polypeptide comprising an amino acid sequence selected from the group consisting of D330A, D330E, and N405Q.

[1408] 278. The nucleic acid or cell of any one of embodiments 201-277, wherein the truncated MyD88 polypeptide has the amino acid sequence of SEQ ID NO: 214, or a functional fragment thereof.

[1409] 279. The nucleic acid or cell of any one of embodiments 201-277, wherein the MyD88 polypeptide has the amino acid sequence of SEQ ID NO: 282, or a functional fragment thereof.

[1410] 280. The nucleic acid or cell of any one of embodiments 201-277, wherein the cytoplasmic CD40 polypeptide has the amino acid sequence of SEQ ID NO: 216, or a functional fragment thereof.

[1411] 281. The nucleic acid or cell of any one of embodiment 223, 226, 38, or 252-280, wherein the T cell receptor binds to an antigenic polypeptide selected from the group consisting of PRAME, Bob-1, and NP-ESO-1.

[1412] 282. The nucleic acid or cell of any one of embodiment 222, 226, 237, or 252-280, wherein the antigen recognition moiety binds to an antigen selected from the group consisting of an antigen on a tumor cell, an antigen on a cell involved in a hyperproliferative disease, a viral antigen, a bacterial antigen, CD19, PSCA, Her2/Neu, PSMA, Muc1, ROR1, Mesothelin, GD2, CD123, Muc16, CD33, CD38, and CD44v6.

[1413] 283. The nucleic acid or cell of any one of embodiment 222, 226, 237, 252-280, or 282, wherein the T cell activation molecule is selected from the group consisting of an ITAM-containing, Signal 1 conferring molecule, a CD3 ζ polypeptide, and an Fc epsilon receptor gamma (FcεR1γ) subunit polypeptide.

[1414] 284. The nucleic acid or cell of any one of embodiment 222, 226, 237, 252-280, or 282-283, wherein the antigen recognition moiety is a single chain variable fragment.

[1415] 285. The nucleic acid or cell of any one of embodiment 222, 226, 237, 252-280, or 282-284, wherein the transmembrane region is a CD8 transmembrane region.

[1416] 286. The nucleic acid of any one of embodiments 201-205, 208-225, or 265-285, wherein the nucleic acid is contained within a viral vector.

[1417] 287. The nucleic acid of embodiment 286, wherein the viral vector is selected from the group consisting of retroviral vector, murine leukemia virus vector, SFG vector, adenoviral vector, lentiviral vector, adeno-associated virus (AAV), Herpes virus, and Vaccinia virus.

[1418] 288. The nucleic acid of any one of embodiments 201-205, 208-225, or 265-287, wherein the nucleic acid is prepared or in a vector designed for electroporation, sonoporation, or biolistics, or is attached to or incorporated in chemical lipids, polymers, inorganic nanoparticles, or polyplexes.

[1419] 289. The nucleic acid of any one of embodiments 201-205, 208-225, or 265-285, wherein the nucleic acid is contained within a plasmid.

[1420] 290. The nucleic acid or cell of any one of embodiments 201-289, comprising a polynucleotide coding for a polypeptide provided in the tables of Examples 23 or 25.

[1421] 291. The nucleic acid or cell of any one of embodiments 201-289, comprising a polynucleotide coding for a polypeptide provided in the tables of Examples 23 or 25 selected from group consisting of FKBPv36, FpK′, FpK, Fv, Fv′, FKBPpK′, FKBPpK “, and FKBPpK”.

[1422] 292. The nucleic acid or cell of any one of embodiments 201-289, comprising a polynucleotide coding for a polypeptide provided in the tables of Examples 23 or 25 selected from group consisting of FRP5-VL, FRP5-VH, FMC63-VL, and FMC63-VH.

[1423] 293. The nucleic acid or cell of any one of embodiments 201-289, comprising a polynucleotide coding for FRP5-VL and FRP5-VH.

[1424] 294. The nucleic acid or cell of any one of embodiments 201-289, comprising a polynucleotide coding for FMC63-VL and FMC63-VH.

[1425] 295. The nucleic acid or cell of any one of embodiments 201-289, comprising a polynucleotide coding for a polypeptide provided in the tables of Examples 23 or 25 selected from group consisting of MyD88L and MyD88.

[1426] 296. The nucleic acid or cell of any one of embodiments 201-289, comprising a polynucleotide coding for a ΔCaspase-9 polypeptide provided in the tables of Examples 23 or 25.

[1427] 297. The nucleic acid or cell of any one of embodiments 201-289, comprising a polynucleotide coding for a ΔCD18 polypeptide provided in the tables of Examples 23 or 25.

[1428] 298. The nucleic acid or cell of any one of embodiments 201-289, comprising a polynucleotide coding for a hCD40 polypeptide provided in the tables of Examples 23 or 25.

[1429] 299. The nucleic acid or cell of any one of embodiments 201-289, comprising a polynucleotide coding for a CD3zeta polypeptide provided in the tables of Examples 23 or 25.

[1430] 300. Reserved.

[1431] 301. A method of stimulating an immune response in a subject, comprising:
[1432] a) transplanting modified cells of any one of embodiments 226-238, 252-264, or 265-285 into the subject, and
[1433] b) after (a), administering an effective amount of a rapamycin or a rapalog that binds to the FRB or FRB variant region of the chimeric stimulating polypeptide to stimulate a cell mediated immune response.

[1434] 302. A method of administering a ligand to a human subject who has undergone cell therapy using modified cells, comprising administering rapamycin or a rapalog to the human subject, wherein the modified cells comprise modified cells of any one of embodiments 226-238, 252-264, or 265-285.

[1435] 303. A method of controlling activity of transplanted modified cells in a subject, comprising:
[1436] a) transplanting a modified cell of any one of embodiments 226-238, or 252-285; and
[1437] b) after (a), administering an effective amount of rapamycin or a rapalog that binds to the FRB or FRB variant region of the chimeric stimulating polypeptide to stimulate the activity of the transplanted modified cells.

[1438] 304. A method for treating a subject having a disease or condition associated with an elevated expression of a target antigen expressed by a target cell, comprising
[1439] a) transplanting an effective amount of modified cells into the subject; wherein the modified cells comprise a modified cell of any one of embodiments 226-238, or 252-285, wherein the modified cell comprises a chimeric antigen receptor comprising an antigen recognition moiety that binds to the target antigen, and
[1440] b) after a), administering an effective amount of rapamycin or a rapalog that binds to the FRB or FRB variant region of the chimeric stimulating polypeptide to reduce the number or concentration of target antigen or target cells in the subject.

[1441] 305. The method of embodiment 304, wherein the target antigen is a tumor antigen.

[1442] 306. A method for treating a subject having a disease or condition associated with an elevated expression of a target antigen expressed by a target cell, comprising
[1443] a) administering to the subject an effective amount of modified cells, wherein the modified cells comprise a modified cell of any one of embodiments 226-238, or 252-285, wherein the modified cell comprises a chimeric T cell receptor that recognizes and binds to the target antigen, and
[1444] b) after a), administering an effective amount of rapamycin or a rapalog that binds to the FRB or FRB variant region of the chimeric stimulating polypeptide to reduce the number or concentration of target antigen or target cells in the subject.

[1445] 307. A method for reducing the size of a tumor in a subject, comprising
[1446] a) administering a modified cell of any one of embodiments 226-238, or 252-285 to the subject, wherein the cell comprises a chimeric antigen receptor comprising an antigen recognition moiety that binds to an antigen on the tumor; and
[1447] b) after a), administering an effective amount of rapamycin or a rapalog that binds to the FRB or FRB variant region of the chimeric stimulating polypeptide to reduce the size of the tumor in the subject.

[1448] 308. The method of any one of embodiments 304-307, comprising measuring the number or concentration of target cells in a first sample obtained from the subject before administering second ligand, measuring the number or concentration of target cells in a second sample obtained from the subject after administering the ligand, and determining an increase or decrease of the number or concentration of target cells in the second sample compared to the number or concentration of target cells in the first sample.

[1449] 309. The method of embodiment 308, wherein the concentration of target cells in the second sample is decreased compared to the concentration of target cells in the first sample.

[1450] 310. The method of embodiment 308, wherein the concentration of target cells in the second sample is increased compared to the concentration of target cells in the first sample.

[1451] 311. The method of any one of embodiments 301-310, wherein the subject has received a stem cell transplant before or at the same time as administration of the modified cells.

[1452] 312. The method of any one of embodiments 301-311, wherein at least 1×10⁶ transduced or transfected modified cells are administered to the subject.

[1453] 313. The method of any one of embodiments 301-311, wherein at least 1×10⁷ transduced or transfected modified cells are administered to the subject.

[1454] 314. The method of any one of embodiments 301-311, wherein at least 1×10⁸ modified cells are administered to the subject.

[1455] 314.1. The method of any one of embodiments 301-314, wherein the FKBP12 variant region is FKBP12v36 and the ligand that binds to the FKBP12 variant region is AP1903.

[1456] 315. A method of controlling survival of transplanted modified cells in a subject, comprising
[1457] a) transplanting modified cells of any one of embodiments 226-238, or 252-285 into the subject, and
[1458] b) after (a), administering to the a ligand that binds to the FKBP12 variant region of the chimeric pro-apoptotic polypeptide in an amount effective to kill less than 30% of the modified cells that express the chimeric pro-apoptotic polypeptide.

[1459] 316. The method of any one of embodiments 301-314.1, further comprising after (b), administering to the subject a ligand that binds to the FKBP12 variant region of the chimeric pro-apoptotic polypeptide in an amount effective to kill less than 30% of the modified cells that express the chimeric pro-apoptotic polypeptide.

[1460] 317. The method of any one of embodiments 315 or 316, wherein the a ligand that binds to the FKBP12 variant region is administered in an amount effective to kill less than 40% of the modified cells that express the chimeric pro-apoptotic polypeptide.

[1461] 318. The method of any one of embodiments 315 or 316, wherein the a ligand that binds to the FKBP12 variant region is administered in an amount effective to kill less than 50% of the modified cells that express the chimeric pro-apoptotic polypeptide.

[1462] 319. The method of any one of embodiments 315 or 316, wherein the a ligand that binds to the FKBP12 variant region is administered in an amount effective to kill less than 60% of the modified cells that express the chimeric pro-apoptotic polypeptide.

[1463] 320. The method of any one of embodiments 315 or 316, wherein the a ligand that binds to the FKBP12 variant region is administered in an amount effective to kill less than 70% of the modified cells that express the chimeric pro-apoptotic polypeptide.

[1464] 321. The method of any one of embodiments 315 or 316, wherein the a ligand that binds to the FKBP12 variant region is administered in an amount effective to kill less than 90% of the modified cells that express the chimeric pro-apoptotic polypeptide.

[1465] 322. The method of any one of embodiments 315 or 316, wherein the a ligand that binds to the FKBP12 variant region is administered in an amount effective to kill at least 90% of the modified cells that express the chimeric pro-apoptotic polypeptide.

[1466] 323. The method of any one of embodiments 315 or 316, wherein the a ligand that binds to the FKBP12 variant region is administered in an amount effective to kill at least 95% of the modified cells that express the chimeric pro-apoptotic polypeptide.

[1467] 324. The method of any one of embodiments 315-316, wherein the chimeric costimulating polypeptide comprises a FRB_{L} region.

[1468] 325. The method of any one of embodiments 301-314.1, wherein more than one dose of the ligand is administered to the subject.

[1469] 326. The method of any one of embodiments 315-325, wherein more than one dose of the a ligand that binds to the FKBP12 variant region is administered to the subject.

[1470] 327. The method of any one of embodiments 301-325, further comprising identifying a presence or absence of a condition in the subject that requires the removal of the modified cells from the subject; and administering a ligand that binds to the FKBP12 variant region, maintaining a subsequent dosage of the ligand, or adjusting a subsequent dosage of the ligand to the subject based on the presence or absence of the condition identified in the subject.

[1471] 328. The method of any one of embodiments 301-325, further comprising receiving information comprising presence or absence of a condition in the subject that requires the removal of the modified cells from the subject; and administering the a ligand that binds to the FKBP12 variant region, maintaining a subsequent dosage of the ligand, or adjusting a subsequent dosage of the ligand to the subject based on the presence or absence of the condition identified in the subject.

[1472] 329. The method of any one of embodiments 301-325, further comprising identifying a presence or absence of a condition in the subject that requires the removal of the modified cells from the subject; and transmitting the presence, absence or stage of the condition identified in the subject to a decision maker who administers a ligand that binds to the FKBP12 variant region, maintains a subsequent dosage of the ligand, or adjusts a subsequent dosage of the ligand administered to the subject based on the presence, absence or stage of the condition identified in the subject.

[1473] 330. The method of any one of embodiments 301-325, further comprising identifying a presence or absence of a condition in the subject that requires the removal of the modified cells from the subject; and transmitting an indication to administer the a ligand that binds to the FKBP12 variant region, maintain a subsequent dosage of the ligand, or adjust a subsequent dosage of the ligand administered to the subject based on the presence, absence or stage of the condition identified in the subject.

[1474] 331. The method of any one of embodiments 301-330, wherein the subject has cancer.

[1475] 332. The method of any one of embodiments 301-331, wherein the modified cell is delivered to a tumor bed.

[1476] 333. The method of any one of embodiments 331 or 332, wherein the cancer is present in the blood or bone marrow of the subject.

[1477] 334. The method of any one of embodiments 301-330, wherein the subject has a blood or bone marrow disease.

[1478] 335. The method of any one of embodiments 301-330, wherein the subject has been diagnosed with sickle cell anemia or metachromatic leukodystrophy.

[1479] 336. The method of any one of embodiments 301-330, wherein the patient has been diagnosed with a condition selected from the group consisting of a primary immune deficiency condition, hemophagocytosis lymphohistiocytosis (HLH) or other hemophagocytic condition, an inherited marrow failure condition, a hemoglobinopathy, a metabolic condition, and an osteoclast condition.

[1480] 337. The method of any one of embodiments 301-330, wherein the patient has been diagnosed with a disease or condition selected from the group consisting of Severe Combined Immune Deficiency (SCID), Combined Immune Deficiency (CID), Congenital T-cell Defect/Deficiency, Common Variable Immune Deficiency (CVID), Chronic Granulomatous Disease, IPEX (Immune deficiency, polyendocrinopathy, enteropathy, X-linked) or IPEX-like, Wiskott-Aldrich Syndrome, CD40 Ligand Deficiency, Leukocyte Adhesion Deficiency, DOCA 8 Deficiency, IL-10 Deficiency/IL-10 Receptor Deficiency, GATA 2 deficiency, X-linked lymphoproliferative disease (XLP), Cartilage Hair Hypoplasia, Shwachman Diamond Syndrome, Diamond Blackfan Anemia, Dyskeratosis Congenita, Fanconi Anemia, Congenital Neutropenia, Sickle Cell Disease, Thalassemia, Mucopolysaccharidosis, Sphingolipidoses, and Osteopetrosis.

[1481] 338. A method for expressing a chimeric costimulating polypeptide wherein the chimeric costimulating polypeptide comprises
[1482] a) a costimulating polypeptide region comprising
   [1483] i) a MyD88 polypeptide region or a truncated MyD88 polypeptide region lacking the TIR domain; and
   [1484] ii) a CD40 cytoplasmic polypeptide region lacking the CD40 extracellular domain;
[1485] b) a FRB or FRB variant region; and
[1486] c) a FKBP12 polypeptide region.
   comprising contacting a nucleic acid of any one of embodiments 301-306 with a cell under conditions in which the nucleic acid is incorporated into the cell, whereby the cell expresses the first and second chimeric polypeptides from the incorporated nucleic acid.

[1487] 339. The method of embodiment 338, wherein the nucleic acid is contacted with the cell ex vivo.

[1488] 340. The method of embodiment 338, wherein the nucleic acid is contacted with the cell in vivo.

### Example 34: Additional Representative Embodiments

[1489] 1. A modified cell, comprising
[1490] a) a first polynucleotide encoding a chimeric pro-apoptotic polypeptide, wherein the chimeric pro-apoptotic polypeptide comprises
   [1491] i) a pro-apoptotic polypeptide region;
   [1492] ii) a FKBP12-Rapamycin-Binding (FRB) domain polypeptide, or FRB variant polypeptide region; and
   [1493] iii) a FKBP12 or FKBP12 variant polypeptide region (FKBP12v); and
[1494] b) a second polynucleotide encoding a chimeric costimulating polypeptide, wherein the chimeric costimulating polypeptide comprises two FKBP12 variant polypeptide regions and
   i) a MyD88 polypeptide region or a truncated MyD88 polypeptide region lacking the TIR domain; or
   ii) a MyD88 polypeptide region or a truncated MyD88 polypeptide region lacking the TIR domain, and a CD40 cytoplasmic polypeptide region lacking the CD40 extracellular domain.

[1495] 2. The modified cell of claim 1, wherein the chimeric costimulating polypeptide comprises two FKBP12 variant polypeptide regions and a truncated MyD88 polypeptide region lacking the TIR domain.

[1496] 3. The modified cell of claim 1, wherein the chimeric costimulating polypeptide comprises two FKBP12 variant polypeptide regions, a truncated MyD88 polypeptide region lacking the TIR domain, and a CD40 cytoplasmic polypeptide region lacking the CD40 extracellular domain.

[1497] 4. The modified cell of any of claims 1-3, wherein the chimeric pro-apoptotic polypeptide comprises (i) a pro-apoptotic polypeptide region, (ii) a FRB or FRB variant polypeptide region, and (iii) a FKBP12 polypeptide region.

[1498] 5. The modified cell of any one of claims 1-5, wherein the cell further comprises a third polynucleotide encoding a heterologous protein.

[1499] 6. The modified cell of claim 6, wherein the heterologous protein is a chimeric antigen receptor.

[1500] 7. The modified cell of claim 7, wherein the heterologous protein is a recombinant T cell receptor.

[1501] 8. A nucleic acid comprising a promoter operably linked to
[1502] a) a first polynucleotide encoding a chimeric pro-apoptotic polypeptide, wherein the chimeric pro-apoptotic polypeptide comprises
   [1503] i) a pro-apoptotic polypeptide region;
   [1504] ii) a FKBP12-Rapamycin-Binding (FRB) domain polypeptide, or FRB variant polypeptide region; and
   [1505] iii) a FKBP12 or FKBP12 variant polypeptide region (FKBP12v); and
[1506] b) a second polynucleotide encoding a chimeric costimulating polypeptide, wherein the chimeric costimulating polypeptide comprises two FKBP12 variant polypeptide regions and
   i) a MyD88 polypeptide region or a truncated MyD88 polypeptide region lacking the TIR domain; or
   ii) a MyD88 polypeptide region or a truncated MyD88 polypeptide region lacking the TIR domain, and a CD40 cytoplasmic polypeptide region lacking the CD40 extracellular domain.

[1507] 9. The nucleic acid of claim 8, wherein the chimeric pro-apoptotic polypeptide comprises a pro-apoptotic polypeptide region, a FRB or FRB variant polypeptide region, and a FKBP12 polypeptide region.

[1508] 10. The nucleic acid of any one of claims 8-9, wherein the chimeric costimulating polypeptide comprises a MyD88 polypeptide region or a truncated MyD88 polypeptide region lacking the TIR domain.

[1509] 11. The nucleic acid of any one of claims 8-9, wherein the chimeric costimulating polypeptide comprises a truncated MyD88 polypeptide region lacking the TIR domain and a CD40 cytoplasmic polypeptide region lacking the CD40 extracellular domain.

[1510] 12. The nucleic acid of any one of claims 8-11, wherein the promoter is operably linked to a third polynucleotide, wherein the third polynucleotide encodes a heterologous protein.

[1511] 13. The nucleic acid of claim 12, wherein the heterologous protein is a chimeric antigen receptor.

[1512] 14. The nucleic acid of claim 12, wherein the heterologous protein is a recombinant TCR.

[1513] 15. The nucleic acid of any one of claims 8-14, wherein the nucleic acid further comprises a polynucleotide encoding a linker polypeptide between the first polynucleotide and the second polynucleotide, wherein the linker polypeptide separates the translation products of the first and second polynucleotides during or after translation.

[1514] 16. The nucleic acid of claim 15, wherein the nucleic acid further comprises a polynucleotide encoding a linker polypeptide between the third polynucleotide and the first or the second polynucleotide, wherein the linker polypeptide separates the translation product of the third polynucleotide from the translation products of the first or second polynucleotides during or after translation.

[1515] 17. The nucleic acid of any one of claim 15 or 16, wherein the linker polypeptide is a 2A polypeptide.

[1516] 18. A modified cell transduced or transfected with a nucleic acid of any one of claims 8-17

[1517] 19. The modified cell or the nucleic acid of any one of claims 1-18, wherein the FRB polypeptide or FRB variant polypeptide region and the FKBP12 polypeptide or FKBP12 variant polypeptide region are amino terminal to the pro-apoptotic polypeptide of the chimeric pro-apoptotic polypeptide.

[1518] 20. The modified cell or the nucleic acid of claim 19, wherein the FRB polypeptide or FRB variant polypeptide region is amino terminal to the FKBP12 polypeptide or FKBP12 variant polypeptide region.

[1519] 21. The modified cell or the nucleic acid of claim 19, wherein the FKBP12 polypeptide or FKBP12 variant polypeptide region is amino terminal to the FRB or FRB variant polypeptide region.

[1520] 22. The modified cell or the nucleic acid of any one of claims 1-21, wherein the FKBP12 variant polypeptide region binds to a ligand with at least 100 times more affinity than the ligand binds to the FKBP12 polypeptide region.

[1521] 23. The modified cell or the nucleic acid of any one of claims 1-21, wherein the FKBP12 variant polypeptide region binds to a ligand with at least 500 times more affinity than the ligand binds to the FKBP12 polypeptide region.

[1522] 24. The modified cell or the nucleic acid of any one of claims 1-21, wherein the FKBP12 variant polypeptide region binds to a ligand with at least 1000 times more affinity than the ligand binds to the wild type FKBP12 polypeptide region.

[1523] 25. The modified cell or the nucleic acid of any one of claims 1-24, wherein the FKBP12 variant polypeptide comprises an amino acid substitution at amino acid residue 36.

[1524] 26. The modified cell or the nucleic acid of claim 25, wherein the amino acid substitution at position 36 selected from the group consisting of valine, leucine, isoleuceine and alanine.

[1525] 27. The modified cell or the nucleic acid of any one of claims 1-21, wherein the FKBP12 variant polypeptide region is a FKBP12v36 polypeptide region.

[1526] 28. The modified cell or the nucleic acid of any one of claims 22-24, wherein the ligand is rimiducid.

[1527] 29. The modified cell or the nucleic acid of any one of claim 224, wherein the ligand is AP20187 or AP1510.

[1528] 30. The modified cell or the nucleic acid of any one of claims 1-29, wherein the FRB variant polypeptide binds to a C7 rapalog.

[1529] 31. The modified cell or the nucleic acid of any one of claims 1-30, wherein the FRB variant polypeptide comprises an amino acid substitution at position T2098 or W2101.

[1530] 32. The modified cell or the nucleic acid of any one of claims 1-31, wherein the FRB variant polypeptide region is selected from the group consisting of KLW (T2098L) (FRBL), KTF (W2101F), and KLF (T2098L, W2101F).

[1531] 33. The modified cell or the nucleic acid of any one of claims 1-32, wherein the FRB variant polypeptide region is FRBL.

[1532] 34. The modified cell of any one of claims 1-33, wherein the FRB variant polypeptide region binds to a rapalog selected from the group consisting of S-o,p-dimethoxyphenyl (DMOP)-rapamycin, R-Isopropoxyrapamycin, C7-Isobutyloxyrapamycin, and S-Butanesulfonamidorap.

[1533] 35. The modified cell or the nucleic acid of any one of claims 1-34, wherein the cell or the nucleic acid comprises a polynucleotide that encodes a chimeric antigen receptor, wherein the chimeric antigen receptor comprises (i) a transmembrane region, (ii) a T cell activation molecule, and (iii) an antigen recognition moiety.

[1534] 36. The modified cell or the nucleic acid of claim 33, wherein the T cell activation molecule is selected from the group consisting of an ITAM-containing, Signal 1 conferring molecule, a Syk polypeptide, a ZAP70 polypeptide, a CD3 Z polypeptide, and an Fc epsilon receptor gamma (FcεR1γ) subunit polypeptide.

[1535] 37. The modified cell or the nucleic acid of claim 33, wherein the T cell activation molecule is selected from the group consisting of an ITAM-containing, Signal 1 conferring molecule, a CD3 ζ polypeptide, and an Fc epsilon receptor gamma (FcεR1γ) subunit polypeptide.

[1536] 38. The modified cell or the nucleic acid of any one of claims 35-371, wherein the antigen recognition moiety is a single chain variable fragment.

[1537] 39. The modified cell or the nucleic acid of any one of claims 35-38, wherein the transmembrane region is a CD8 transmembrane region.

[1538] 40. The modified cell or the nucleic acid of any one of claims 35-39, wherein the antigen recognition moiety binds to an antigen selected from the group consisting of an antigen on a tumor cell, an antigen on a cell involved in a hyperproliferative disease, a viral antigen, a bacterial antigen, CD19, PSCA, Her2/Neu, PSMA, Muc1Muc1, Muc1, ROR1, Mesothelin, GD2, CD123, Muc16, CD33, CD38, and CD44v6.

[1539] 41. The modified cell or the nucleic acid of any one of claims 35-40 wherein the antigen recognition moiety binds to an antigen selected from the group consisting of an antigen on a tumor cell, an antigen on a cell involved in a hyperproliferative disease, a viral antigen, a bacterial antigen, CD19, PSCA, Her2/Neu, PSMA, Muc1Muc1, Muc1, ROR1, Mesothelin, GD2, CD123, Muc16, CD33, CD38, and CD44v6.

[1540] 42. The modified cell of any one of claims 1-34, wherein the cell comprises a polynucleotide encoding a recombinant T cell receptor, wherein the recombinant T cell receptor binds to an antigenic polypeptide selected from the group consisting of PRAME, Bob-1, and NY-ESO-1.

[1541] 43. The modified cell or the nucleic acid of any one of claims 1-42, wherein the pro-apoptotic polypeptide is selected from the group consisting of Caspase 1, 2, 3, 4, 5, 6, 7, 8, 9, 10, 11, 12, 13, or 14, FADD (DED), APAF1 (CARD), CRADD/RAIDD CARD), ASC (CARD), Bax, Bak, Bcl-XL, Bcl-2, RIPK3, and RIPK1-RHIM.

[1542] 44. The modified cell or the nucleic acid of any one of claims 1-43, wherein the pro-apoptotic polypeptide is a caspase polypeptide.

[1543] 45. The modified cell or the nucleic acid of claim 44, wherein the pro-apoptotic polypeptide is a Caspase-9 polypeptide.

[1544] 46. The nucleic acid of cell of claim 45, wherein the Caspase-9 polypeptide lacks the CARD domain.

[1545] 47. The modified cell or the nucleic acid of any one of claim 45 or 46, wherein the caspase polypeptide comprises the amino acid sequence of SEQ ID NO: 300.

[1546] 48. The modified cell or the nucleic acid of any one of claims 44-47, wherein the caspase polypeptide is a modified Caspase-9 polypeptide comprising an amino acid substitution selected from the group consisting of the catalytically active caspase variants in Tables 5 or 6.

[1547] 49. The modified cell or the nucleic acid of claim 48, wherein the caspase polypeptide is a modified Caspase-9 polypeptide comprising an amino acid sequence selected from the group consisting of D330A, D330E, and N405Q.

[1548] 50. The modified cell or the nucleic acid of any one of claims 1-49, wherein the truncated MyD88 polypeptide has the amino acid sequence of SEQ ID NO: 214 or 305, or a functional fragment thereof.

[1549] 51. The modified cell or the nucleic acid of any one of claims 1-49, wherein the MyD88 polypeptide has the amino acid sequence of SEQ ID NO: 282, or a functional fragment thereof.

[1550] 52. The modified cell or the nucleic acid of any one of claims 1-51, wherein the cytoplasmic CD40 polypeptide has the amino acid sequence of SEQ ID NO: 216, or a functional fragment thereof.

[1551] 53. The modified cell of claim 1, wherein,
[1552] a) the chimeric pro-apoptotic polypeptide comprises a Caspase-9 polypeptide lacking the CARD domain, a FRBL polypeptide region and a FKBP12 polypeptide region; and
[1553] b) the chimeric costimulating polypeptide comprises a truncated MyD88 polypeptide region lacking the TIR domain and two FKBP12v36 polypeptide regions.

[1554] 54. The modified cell of claim 1, wherein,
[1555] a) the chimeric pro-apoptotic polypeptide comprises a Caspase-9 polypeptide lacking the CARD domain, a FRBL polypeptide region and a FKBP12 polypeptide region; and
[1556] b) the chimeric costimulating polypeptide comprises a truncated MyD88 polypeptide region lacking the TIR domain, a CD40 cytoplasmic polypeptide region lacking the extracellular domain, and two FKBP12v36 polypeptide regions.

[1557] 55. The nucleic acid of claim 19, wherein,
[1558] a) the chimeric pro-apoptotic polypeptide comprises a Caspase-9 polypeptide lacking the CARD domain, a FRBL polypeptide region and a FKBP12 polypeptide region; and
[1559] b) the chimeric costimulating polypeptide comprises a truncated MyD88 polypeptide region lacking the TIR domain and two FKBP12v36 polypeptide regions.

[1560] 56. The nucleic acid of claim 19, wherein,
[1561] a) the chimeric pro-apoptotic polypeptide comprises a Caspase-9 polypeptide lacking the CARD domain, a FRBL polypeptide region and a FKBP12 polypeptide region; and
[1562] b) the chimeric costimulating polypeptide comprises a truncated MyD88 polypeptide region lacking the TIR domain, a CD40 cytoplasmic polypeptide region lacking the extracellular domain, and two FKBP12v36 polypeptide regions.

[1563] 57. The modified cell of any one of claim 1-8, 18, or 19-36, wherein the cell is a T cell, tumor infiltrating lymphocyte, NK-T cell, or NK cell.

[1564] 58. The modified cell of any one of claim 1-8, 18, or 19-36, wherein the cell is a T cell, NK-T cell, or NK cell.

[1565] 59. The modified cell of any one of claim 1-8, 18, or 19-36, wherein the cell is a T cell.

[1566] 60. The modified cell of any one of claim 1-8, 18, or 19-36, wherein the cell is a primary T cell.

[1567] 61. The modified cell of any one of claim 1-8, 18, or 19-36, wherein the cell is a cytotoxic T cell.

[1568] 62. The modified cell of any one of claim 1-8, 18, or 19-36, wherein the cell is selected from the group consisting of embryonic stem cell (ESC), inducible pluripotent stem cell (iPSC), non-lymphocytic hematopoietic cell, non-hematopoietic cell, macrophage, keratinocyte, fibroblast, melanoma cell, tumor infiltrating lymphocyte, natural killer cell, natural killer T cell, or T cell.

[1569] 63. The modified cell of any one of claim 1-8, 18, or 19-36, wherein the T cell is a helper T cell.

[1570] 64. The modified cell of any one of claim 1-8, 18, or 19-36, wherein the cell is obtained or prepared from bone marrow.

[1571] 65. The modified cell of any one claim 1-8, 18, or 19-36, wherein the cell is obtained or prepared from umbilical cord blood.

[1572] 66. The modified cell of any one of claim 1-8, 18, or 19-36, wherein the cell is obtained or prepared from peripheral blood.

[1573] 67. The modified cell of any one of claim 1-8, 18, or 19-36, wherein the cell is obtained or prepared from peripheral blood mononuclear cells.

[1574] 68. The modified cell of any one of claim 1-8, 18, 19-36 or 57-67, wherein the cell is a human cell.

[1575] 69. The modified cell of any one of claim 1-8, 18, 19-36 or 57-68, wherein the modified cell is transduced or transfected in vivo.

[1576] 70. The modified cell of any one of claim 1-8, 18, 19-36 or 57-69, wherein the cell is transfected or transduced by the nucleic acid vector using a method selected from the group consisting of electroporation, sonoporation, biolistics (e.g., Gene Gun with Au-particles), lipid transfection, polymer transfection, nanoparticles, or polyplexes.

[1577] 71. A kit or composition comprising nucleic acid comprising
[1578] a) a first polynucleotide encoding a chimeric pro-apoptotic polypeptide, wherein the chimeric pro-apoptotic polypeptide comprises
   [1579] i) a pro-apoptotic polypeptide region;
   [1580] ii) a FKBP12-Rapamycin-Binding (FRB) domain polypeptide region, or variant thereof; and
   [1581] iii) a FKBP12 polypeptide or FKBP12 variant polypeptide region (FKBP12v); and
[1582] b) a second polynucleotide encoding a chimeric costimulating polypeptide, wherein the chimeric costimulating polypeptide comprises two FKBP12 variant polypeptide regions and
   i) a MyD88 polypeptide region or a truncated MyD88 polypeptide region lacking the TIR domain; or
   ii) a MyD88 polypeptide region or a truncated MyD88 polypeptide region lacking the TIR domain, and a CD40 cytoplasmic polypeptide region lacking the CD40 extracellular domain.

[1583] 72. The kit or composition of claim 71, wherein the chimeric pro-apoptotic polypeptide comprises a pro-apoptotic polypeptide region, a FRB or FRB variant polypeptide region, and a FKBP12 polypeptide region.

[1584] 73. The kit or composition of any one of claims 71-72, wherein the chimeric costimulating polypeptide comprises a MyD88 polypeptide region or a truncated MyD88 polypeptide region lacking the TIR domain.

[1585] 74. The kit or composition of any one of claims 71-72, wherein the chimeric costimulating polypeptide comprises a truncated MyD88 polypeptide region lacking the TIR domain and a CD40 cytoplasmic polypeptide region lacking the CD40 extracellular domain.

[1586] 75. The kit or composition of claim 71, wherein the nucleic acid is a nucleic acid of any one of claim 8-17, 19-212, or 55-56.

[1587] 76. The kit or composition of any one of claims 71-75, further comprising a third polynucleotide, wherein the third polynucleotide encodes a heterologous protein.

[1588] 77. The kit or composition of 72, wherein the heterologous protein is a chimeric antigen receptor.

[1589] 78. The kit or composition of claim 72, wherein the heterologous protein is a recombinant TCR.

[1590] 79. The kit or composition of any one of claims 71-75, comprising a virus, wherein the virus comprises the first and the second polynucleotide.

[1591] 80. The kit or composition of any one of claims 72-78, comprising a virus, wherein the virus comprises the first, second, and third polynucleotides.

[1592] 81. The kit or composition of any one of claims 72-78, comprising a virus, wherein the virus comprises the first and third polynucleotides.

[1593] 82. The kit or composition of any one of claims 72-78, comprising a virus, wherein the virus comprises the second and third polynucleotides.

[1594] 83. A method for expressing a chimeric pro-apoptotic polypeptide, wherein the chimeric pro-apoptotic polypeptide comprises
[1595] a) a pro-apoptotic polypeptide region; a FRB polypeptide or FRB variant polypeptide region; and
[1596] b) a FKBP12 polypeptide region,
   comprising contacting a nucleic acid of any one of claim 8-17, 19-52, or 55-56, with a cell under conditions in which the nucleic acid is incorporated into the cell, whereby the cell expresses the chimeric pro-apoptotic polypeptide from the incorporated nucleic acid.

[1597] 84. The method of claim 83, wherein the cell further expresses a chimeric costimulating polypeptide, wherein the chimeric costimulating polypeptide comprises
[1598] a) two FKBP12 variant polypeptide regions; and
[1599] b) a MyD88 polypeptide region or a truncated MyD88 polypeptide region lacking the TIR domain, or a MyD88 polypeptide region or a truncated MyD88 polypeptide region lacking the TIR domain and a CD40 cytoplasmic polypeptide region lacking the CD40 extracellular domain.

[1600] 85. The method of any one of claim 83 or 84, wherein the nucleic acid is contacted with the cell ex vivo.

[1601] 86. The method of any one of claim 83 or 84, wherein the nucleic acid is contacted with the cell in vivo.

[1602] 87. A method of stimulating an immune response in a subject, comprising:
[1603] a) transplanting modified cells of any one of claim 1-8, 18, 19-36, or 57-70 into the subject, and
[1604] b) after (a), administering an effective amount of a ligand that binds to the FKBP12 variant polypeptide region of the chimeric costimulating polypeptide to stimulate a cell mediated immune response.

[1605] 88. A method of administering a ligand to a subject who has undergone cell therapy using modified cells, comprising administering a ligand that binds to the FKBP variant region of the chimeric costimulating polypeptide to the human subject, wherein the modified cells comprise modified cells of any one of claim 1-8, 18, 19-36, or 57-70.

[1606] 89. A method of controlling activity of transplanted modified cells in a subject, comprising:
[1607] a) transplanting a modified cell of any one of claim 1-8, 18, 19-36, or 57-70; and
[1608] b) after (a), administering an effective amount of a ligand that binds to the FKBP12 variant polypeptide region of the chimeric costimulating polypeptide to stimulate the activity of the transplanted modified cells.

[1609] 90. A method for treating a subject having a disease or condition associated with an elevated expression of a target antigen expressed by a target cell, comprising
[1610] a) transplanting an effective amount of modified cells into the subject; wherein the modified cells comprise a modified cell of any one of claim 1-8, 18, 19-36, or 57-70, wherein the modified cell comprises a chimeric antigen receptor comprising an antigen recognition moiety that binds to the target antigen, and
[1611] b) after a), administering an effective amount of a ligand that binds to the FKBP12 variant polypeptide region of the chimeric costimulating polypeptide to reduce the number or concentration of target antigen or target cells in the subject.

[1612] 91. The method of claim 90, wherein the target antigen is a tumor antigen.

[1613] 92. A method for treating a subject having a disease or condition associated with an elevated expression of a target antigen expressed by a target cell, comprising
[1614] a) administering to the subject an effective amount of modified cells, wherein the modified cells comprise a modified cell of any one of claim 1-8, 18, 19-36, or 57-70, wherein the modified cell comprises a recombinant T cell receptor that recognizes and binds to the target antigen, and
[1615] b) after a), administering an effective amount of a ligand that binds to the FKBP12 variant polypeptide region of the chimeric costimulating polypeptide to reduce the number or concentration of target antigen or target cells in the subject.

[1616] 93. A method for reducing the size of a tumor in a subject, comprising
[1617] a) administering a modified cell of any one of claim 1-8, 18, 19-36, or 57-70 to the subject, wherein the cell comprises a chimeric antigen receptor comprising an antigen recognition moiety that binds to an antigen on the tumor; and
[1618] b) after a), administering an effective amount of a ligand that binds to the FKBP12 variant polypeptide region of the chimeric costimulating polypeptide to reduce the size of the tumor in the subject.

[1619] 94. The method of any one of claims 90-93, comprising measuring the number or concentration of target cells in a first sample obtained from the subject before administering second ligand, measuring the number or concentration of target cells in a second sample obtained from the subject after administering the ligand, and determining an increase or decrease of the number or concentration of target cells in the second sample compared to the number or concentration of target cells in the first sample.

[1620] 95. The method of claim 94, wherein the concentration of target cells in the second sample is decreased compared to the concentration of target cells in the first sample.

[1621] 96. The method of claim 94, wherein the concentration of target cells in the second sample is increased compared to the concentration of target cells in the first sample.

[1622] 97. The method of any one of claims 87-96, wherein the subject has received a stem cell transplant before or at the same time as administration of the modified cells.

[1623] 98. The method of any one of claims 87-97, wherein at least 1×106 transduced or transfected modified cells are administered to the subject.

[1624] 99. The method of any one of claims 87-97, wherein at least 1×107 transduced or transfected modified cells are administered to the subject.

[1625] 100. The method of any one of claims 87-97, wherein at least 1×108 modified cells are administered to the subject.

[1626] 101. The method of any one of claims 87-100, wherein the FKBP12 variant polypeptide region is FKBP12v36 and the ligand that binds to the FKBP12 variant polypeptide region is AP1903.

[1627] 102. A method of controlling survival of transplanted modified cells in a subject, comprising
[1628] a) transplanting modified cells of any one of claim 1-8, 18, 19-36, or 57-70 into the subject; and
[1629] b) after a), administering to the subject rapamycin or a rapalog that binds to the FRB polypeptide or FRB variant polypeptide region of the chimeric pro-apoptotic polypeptide in an amount effective to kill at least 30% of the modified cells that express the chimeric pro-apoptotic polypeptide.

[1630] 103. The method of any one of claims 87-102, further comprising after b), administering to the subject rapamycin or a rapalog that binds to the FRB variant polypeptide region of the chimeric pro-apoptotic polypeptide in an amount effective to kill at least 30% of the modified cells that express the chimeric pro-apoptotic polypeptide.

[1631] 104. The method of claim 103, wherein the rapamycin or rapalog is administered in an amount effective to kill at least 40% of the modified cells that express the chimeric pro-apoptotic polypeptide.

[1632] 105. The method of any one of claim 102 or 103, wherein the rapamycin or rapalog is administered in an amount effective to kill at least 50% of the modified cells that express the chimeric pro-apoptotic polypeptide.

[1633] 106. The method of any one of claim 102 or 103, wherein the rapamycin or rapalog is administered in an amount effective to kill at least 60% of the modified cells that express the chimeric pro-apoptotic polypeptide.

[1634] 107. The method of any one of claim 102 or 103, wherein the rapamycin or rapalog is administered in an amount effective to kill at least 70% of the modified cells that express the chimeric pro-apoptotic polypeptide.

[1635] 108. The method of any one of claim 102 or 103, wherein the rapamycin or rapalog is administered in an amount effective to kill at least 80% of the modified cells that express the chimeric pro-apoptotic polypeptide.

[1636] 109. The method of any one of claim 102 or 103, wherein the rapamycin or rapalog is administered in an amount effective to kill at least 90% of the modified cells that express the chimeric pro-apoptotic polypeptide.

[1637] 110. The method of any one of claim 102 or 103, wherein the rapamycin or rapalog is administered in an amount effective to kill at least 95% of the modified cells that express the chimeric pro-apoptotic polypeptide.

[1638] 111. The method of any one of claim 102 or 103, wherein the rapamycin or rapalog is administered in an amount effective to kill at least 99% of the modified cells that express the chimeric pro-apoptotic polypeptide.

[1639] 112. The method of any one of claims 102-103, wherein the chimeric pro-apoptotic polypeptide comprises a FRB_{L} region.

[1640] 113. The method of any one of claims 87-101, wherein more than one dose of the ligand is administered to the subject.

[1641] 114. The method of any one of claims 102-113, wherein more than one dose of the rapamycin or rapalog is administered to the subject.

[1642] 115. The method of any one of claims 87-113, further comprising identifying a presence or absence of a condition in the subject that requires the removal of the modified cells from the subject; and administering rapamycin or a rapalog, maintaining a subsequent dosage of rapamycin or the rapalog, or adjusting a subsequent dosage of the rapamycin or the rapalog to the subject based on the presence or absence of the condition identified in the subject.

[1643] 116. The method of any one of claims 87-113, further comprising receiving information comprising presence or absence of a condition in the subject that requires the removal of the modified cells from the subject; and administering the rapamycin or rapalog, maintaining a subsequent dosage of rapamycin or the rapalog, or adjusting a subsequent dosage of rapamycin or the rapalog to the subject based on the presence or absence of the condition identified in the subject.

[1644] 117. The method of any one of claims 87-113, further comprising identifying a presence or absence of a condition in the subject that requires the removal of the modified cells from the subject; and transmitting the presence, absence or stage of the condition identified in the subject to a decision maker who administers rapamycin or the rapalog, maintains a subsequent dosage of the rapamycin or the rapalog, or adjusts a subsequent dosage of the rapamycin or the rapalog administered to the subject based on the presence, absence or stage of the condition identified in the subject.

[1645] 118. The method of any one of claims 87-113, further comprising identifying a presence or absence of a condition in the subject that requires the removal of the modified cells from the subject; and transmitting an indication to administer the rapamycin or the rapalog, maintain a subsequent dosage of the rapamycin or the rapalog, or adjust a subsequent dosage of the rapamycin or the rapalog administered to the subject based on the presence, absence or stage of the condition identified in the subject.

[1646] 119. The method of any one of claims 87-118, wherein the subject has cancer.

[1647] 120. The method of any one of claims 87-119, wherein the modified cell is delivered to a tumor bed.

[1648] 121. The method of any one of claim 119 or 120, wherein the cancer is present in the blood or bone marrow of the subject.

[1649] 122. The method of any one of claims 87-118, wherein the subject has a blood or bone marrow disease.

[1650] 123. The method of any one of claims 87-118, wherein the subject has been diagnosed with sickle cell anemia or metachromatic leukodystrophy.

[1651] 124. The method of any one of claims 87-118, wherein the subject has been diagnosed with a condition selected from the group consisting of a primary immune deficiency condition, hemophagocytosis lymphohistiocytosis (HLH) or other hemophagocytic condition, an inherited marrow failure condition, a hemoglobinopathy, a metabolic condition, and an osteoclast condition.

[1652] 125. The method of any one of claims 87-118, wherein the patient has been diagnosed with a disease or condition selected from the group consisting of Severe Combined Immune Deficiency (SCID), Combined Immune Deficiency (CID), Congenital T-cell Defect/Deficiency, Common Variable Immune Deficiency (CVID), Chronic Granulomatous Disease, IPEX (Immune deficiency, polyendocrinopathy, enteropathy, X-linked) or IPEX-like, Wiskott-Aldrich Syndrome, CD40 Ligand Deficiency, Leukocyte Adhesion Deficiency, DOCA 8 Deficiency, IL-10 Deficiency/IL-10 Receptor Deficiency, GATA 2 deficiency, X-linked lymphoproliferative disease (XLP), Cartilage Hair Hypoplasia, Shwachman Diamond Syndrome, Diamond Blackfan Anemia, Dyskeratosis Congenita, Fanconi Anemia, Congenital Neutropenia, Sickle Cell Disease, Thalassemia, Mucopolysaccharidosis, Sphingolipidoses, and Osteopetrosis.

[1653] 126. A modified cell comprising
[1654] a) a first polynucleotide encoding a chimeric pro-apoptotic polypeptide, wherein the chimeric pro-apoptotic polypeptide comprises
   i) a pro-apoptotic polypeptide region; and
   ii) a FKBP12 variant polypeptide region; and
[1655] b) a second polynucleotide encoding a chimeric costimulating polypeptide, wherein the chimeric costimulating polypeptide comprises
   i) a FKBP12-Rapamycin Binding (FRB) domain polypeptide or FRB variant polypeptide region;
   ii) a FKBP12 polypeptide or FKBP12 variant polypeptide region; and
   iii) a MyD88 polypeptide region or a truncated MyD88 polypeptide region lacking the TIR domain, or a MyD88 polypeptide region, or a truncated MyD88 polypeptide region lacking the TIR domain and a CD40 cytoplasmic polypeptide region lacking the CD40 extracellular domain.

[1656] 127. The modified cell of claim 126, wherein the chimeric costimulating polypeptide comprises a MyD88 polypeptide region or a truncated MyD88 polypeptide region lacking the TIR domain.

[1657] 128. The modified cell of claim 126, wherein the chimeric costimulating polypeptide comprises a truncated MyD88 polypeptide region lacking the TIR domain and a CD40 cytoplasmic polypeptide region lacking the CD40 extracellular domain.

[1658] 129. The modified cell of any one of claims 126-128, wherein the cell further comprises a third polynucleotide, wherein the third polynucleotide encodes a heterologous protein.

[1659] 130. The modified cell of claim 129, wherein the heterologous protein is a chimeric antigen receptor.

[1660] 131. The modified cell of claim 129, wherein the heterologous protein is a recombinant TCR.

[1661] 132. A nucleic acid comprising a promoter operably linked to
[1662] a) a first polynucleotide encoding a chimeric pro-apoptotic polypeptide, wherein the chimeric pro-apoptotic polypeptide comprises
   i) a pro-apoptotic polypeptide region; and
   ii) a FKBP12 variant polypeptide region; and
[1663] b) a second polynucleotide encoding a chimeric costimulating polypeptide, wherein the chimeric costimulating polypeptide comprises
   i) a FKBP12-Rapamycin Binding (FRB) domain polypeptide or FRB variant polypeptide region;
   ii) a FKBP12 polypeptide region; and
   iii) a MyD88 polypeptide region or a truncated MyD88 polypeptide region lacking the TIR domain, or a MyD88 polypeptide region or a truncated MyD88 polypeptide region lacking the TIR domain and a CD40 cytoplasmic polypeptide region lacking the CD40 extracellular domain.

[1664] 133. The nucleic acid of claim 132, wherein the chimeric costimulating polypeptide comprises a MyD88 polypeptide region or a truncated MyD88 polypeptide region lacking the TIR domain.

[1665] 134. The nucleic acid of claim 132, wherein the chimeric costimulating polypeptide comprises a truncated MyD88 polypeptide region lacking the TIR domain and a CD40 cytoplasmic polypeptide region lacking the CD40 extracellular domain.

[1666] 135. The nucleic acid of any one of claims 132-134, wherein the promoter is operably linked to a third polynucleotide, wherein the third polynucleotide encodes a heterologous protein.

[1667] 136. The nucleic acid of claim 135, wherein the heterologous protein is a chimeric antigen receptor.

[1668] 137. The nucleic acid of claim 135, wherein the heterologous protein is a recombinant TCR.

[1669] 138. The nucleic acid of any one of claims 132-137, wherein the nucleic acid further comprises a polynucleotide encoding a linker polypeptide between the first polynucleotide and the second polynucleotide, wherein the linker polypeptide separates the translation products of the first and second polynucleotides during or after translation.

[1670] 139. The nucleic acid of claim 138, wherein the nucleic acid further comprises a polynucleotide encoding a linker polypeptide between the third polynucleotide and the first or the second polynucleotide, wherein the linker polypeptide separates the translation product of the third polynucleotide from the translation products of the first or second polynucleotides during or after translation.

[1671] 140. The nucleic acid of any one of claim 138 or 139, wherein the linker polypeptide is a 2A polypeptide.

[1672] 141. A modified cell transduced or transfected with a nucleic acid of any one of claims 132-140

[1673] 142. The modified cell or the nucleic acid of any one of claims 126-141, wherein the FRB polypeptide or FRB variant polypeptide region and the FKBP12 polypeptide region are amino terminal to the MyD88 polypeptide or truncated MyD88 polypeptide of the chimeric costimulating polypeptide.

[1674] 143. The modified cell or the nucleic acid of claim 142, wherein the FRB polypeptide or FRB variant polypeptide region is amino terminal to the FKBP12 polypeptide region.

[1675] 144. The modified cell or the nucleic acid of claim 142, wherein the FKBP12 polypeptide region is amino terminal to the FRB or FRB variant polypeptide region.

[1676] 145. The modified cell or the nucleic acid of any one of claims 126-144, wherein the FKBP12 variant polypeptide region binds to a ligand with at least 100 times more affinity than the ligand binds to the FKBP12 polypeptide region.

[1677] 146. The modified cell or the nucleic acid of any one of claims 126-144, wherein the FKBP12 variant polypeptide region binds to a ligand with at least 500 times more affinity than the ligand binds to the FKBP12 polypeptide region.

[1678] 147. The modified cell or the nucleic acid of any one of claims 126-144, wherein the FKBP12 variant polypeptide region binds to a ligand with at least 1000 times more affinity than the ligand binds to the FKBP12 polypeptide region.

[1679] 148. The modified cell or the nucleic acid of any one of claims 126-147, wherein the FKBP12 variant polypeptide comprises an amino acid substitution at amino acid residue 36.

[1680] 149. The modified cell or the nucleic acid of claim 148, wherein the amino acid substitution at position 36 selected from the group consisting of valine, leucine, isoleuceine and alanine.

[1681] 150. The modified cell or the nucleic acid of any one of claims 126-144, wherein the FKBP12 variant polypeptide region is a FKBP12v36 polypeptide region.

[1682] 151. The modified cell of any one of claims 145-147, wherein the ligand is rimiducid.

[1683] 152. The modified cell of any one of claims 145-147, wherein the ligand is AP20187.

[1684] 153. The modified cell of any one of claims 126-152, wherein the FRB variant polypeptide binds to a C7 rapalog.

[1685] 154. The modified cell of any one of claims 126-153, wherein the FRB variant polypeptide comprises an amino acid substitution at position T2098 or W2101.

[1686] 155. The modified cell of any one of claims 126-154, wherein the FRB variant polypeptide region is selected from the group consisting of KLW (T2098L) (FRBL), KTF (W2101F), and KLF (T2098L, W2101F).

[1687] 156. The modified cell of any one of claims 126-155, wherein the FRB variant polypeptide region is FRBL.

[1688] 157. The modified cell of any one of claims 126-156, wherein the FRB variant polypeptide region binds to a rapalog selected from the group consisting of S-o,p-dimethoxyphenyl (DMOP)-rapamycin, R-Isopropoxyrapamycin, C7-Isobutyloxyrapamycin, and S-Butanesulfonamidorap.

[1689] 158. The modified cell or the nucleic acid of any one of claims 126-157, wherein the cell or the nucleic acid comprises a polynucleotide that encodes a chimeric antigen receptor, wherein the chimeric antigen receptor comprises (i) a transmembrane region, (ii) a T cell activation molecule, and (iii) an antigen recognition moiety.

[1690] 159. The modified cell or the nucleic acid of claim 158, wherein the T cell activation molecule is selected from the group consisting of an ITAM-containing, Signal 1 conferring molecule, a Syk polypeptide, a ZAP70 polypeptide, a CD3 Z polypeptide, and an Fc epsilon receptor gamma (FcεR1γ) subunit polypeptide.

[1691] 160. The modified cell or the nucleic acid of any one of claim 158 or 159, wherein the antigen recognition moiety is a single chain variable fragment.

[1692] 161. The modified cell or the nucleic acid of any one of claims 158-160, wherein the transmembrane region is a CD8 transmembrane region.

[1693] 162. The modified cell or the nucleic acid of any one of claims 158-161, wherein the antigen recognition moiety binds to an antigen selected from the group consisting of an antigen on a tumor cell, an antigen on a cell involved in a hyperproliferative disease, a viral antigen, a bacterial antigen, CD19, PSCA, Her2/Neu, PSMA, Muc1Muc1, Muc1, ROR1, Mesothelin, GD2, CD123, Muc16, CD33, CD38, and CD44v6.

[1694] 163. The modified cell or the nucleic acid of any one of claims 158-162 wherein the antigen recognition moiety binds to an antigen selected from the group consisting of an antigen on a tumor cell, an antigen on a cell involved in a hyperproliferative disease, a viral antigen, a bacterial antigen, CD19, PSCA, Her2/Neu, PSMA, Muc1Muc1, Muc1, ROR1, Mesothelin, GD2, CD123, Muc16, CD33, CD38, and CD44v6.

[1695] 164. The modified cell or the nucleic acid of any one of claims 126-157, wherein the cell comprises a polynucleotide encoding a recombinant T cell receptor, wherein the recombinant T cell receptor binds to an antigenic polypeptide selected from the group consisting of PRAME, Bob-1, and NY-ESO-1.

[1696] 165. The modified cell or the nucleic acid of any one of claims 126-164, wherein the pro-apoptotic polypeptide is selected from the group consisting of caspase 1, 2, 3, 4, 5, 6, 7, 8, 9, 10, 11, 12, 13, or 14, FADD (DED), APAF1 (CARD), CRADD/RAIDD CARD), ASC (CARD), Bax, Bak, Bcl-XL, Bcl-2, RIPK3, and RIPK1-RHIM.

[1697] 166. The modified cell or the nucleic acid of any one of claims 126-165, wherein the pro-apoptotic polypeptide is a caspase polypeptide.

[1698] 167. The modified cell or the nucleic acid of claim 166, wherein the pro-apoptotic polypeptide is a Caspase-9 polypeptide.

[1699] 168. The nucleic acid of cell of claim 167, wherein the Caspase-9 polypeptide lacks the CARD domain.

[1700] 169. The modified cell or the nucleic acid of any one of claim 167 or 168, wherein the caspase polypeptide comprises the amino acid sequence of SEQ ID NO: 300.

[1701] 170. The modified cell or the nucleic acid of any one of claims 166-168, wherein the caspase polypeptide is a modified Caspase-9 polypeptide comprising an amino acid substitution selected from the group consisting of the catalytically active caspase variants in Tables 5 or 6.

[1702] 171. The modified cell or the nucleic acid of claim 170, wherein the caspase polypeptide is a modified Caspase-9 polypeptide comprising an amino acid sequence selected from the group consisting of D330A, D330E, and N405Q.

[1703] 172. The modified cell or the nucleic acid of any one of claims 126-171, wherein the truncated MyD88 polypeptide has the amino acid sequence of SEQ ID NO: 214 or 305, or a functional fragment thereof.

[1704] 173. The modified cell or the nucleic acid of any one of claims 126-171, wherein the MyD88 polypeptide has the amino acid sequence of SEQ ID NO: 282, or a functional fragment thereof.

[1705] 174. The modified cell or the nucleic acid of any one of claims 126-173, wherein the cytoplasmic CD40 polypeptide has the amino acid sequence of SEQ ID NO: 216, or a functional fragment thereof.

[1706] 175. The modified cell of claim 126, wherein,
[1707] a) the chimeric pro-apoptotic polypeptide comprises a Caspase-9 polypeptide lacking the CARD domain and a FKBP12v36 polypeptide region; and
[1708] b) the chimeric costimulating polypeptide comprises a truncated MyD88 polypeptide region lacking the TIR domain and a FRB_{L} polypeptide region and a FKBP12 polypeptide region.

[1709] 176. The modified cell of claim 126, wherein,
[1710] a) the chimeric pro-apoptotic polypeptide comprises a Caspase-9 polypeptide lacking the CARD domain and a FKBP12v36 polypeptide region; and
[1711] b) the chimeric costimulating polypeptide comprises a truncated MyD88 polypeptide region lacking the TIR domain, a CD40 cytoplasmic polypeptide region lacking the extracellular domain, a FRB_{L} polypeptide region and a FKBP12 polypeptide region.

[1712] 177. The nucleic acid of claim 142, wherein,
[1713] a) the chimeric pro-apoptotic polypeptide comprises a Caspase-9 polypeptide lacking the CARD domain and a FKBP12v36 polypeptide region; and
[1714] b) the chimeric costimulating polypeptide comprises a truncated MyD88 polypeptide region lacking the TIR domain and a FRB_{L} polypeptide region and a FKBP12 polypeptide region.

[1715] 178. The nucleic acid of claim 142, wherein,
[1716] a) the chimeric pro-apoptotic polypeptide comprises a Caspase-9 polypeptide lacking the CARD domain and a FKBP12v36 polypeptide region; and
[1717] b) the chimeric costimulating polypeptide comprises a truncated MyD88 polypeptide region lacking the TIR domain, a CD40 cytoplasmic polypeptide region lacking the extracellular domain, a FRB_{L} polypeptide region and a FKBP12 polypeptide region.

[1718] 179. The modified cell of any one of claim 126-131, 141, or 142-176, wherein the cell is a T cell, tumor infiltrating lymphocyte, NK-T cell, or NK cell.

[1719] 180. The modified cell of any one of claim 126-131 or 141-176, wherein the cell is a T cell, NK-T cell, or NK cell.

[1720] 181. The modified cell of any one of claim 126-131 or 141-176, wherein the cell is a T cell.

[1721] 182. The modified cell of any one of claim 126-131 or 141-176, wherein the cell is a primary T cell.

[1722] 183. The modified cell of any one of claim 126-131 or 141-176, wherein the cell is a cytotoxic T cell.

[1723] 184. The modified cell of any one of claim 126-131 or 141-176, wherein the cell is selected from the group consisting of embryonic stem cell (ESC), inducible pluripotent stem cell (iPSC), non-lymphocytic hematopoietic cell, non-hematopoietic cell, macrophage, keratinocyte, fibroblast, melanoma cell, tumor infiltrating lymphocyte, natural killer cell, natural killer T cell, or T cell.

[1724] 185. The modified cell of any one of claim 126-131 or 141-176, wherein the T cell is a helper T cell.

[1725] 186. The modified cell of any one of claim 126-131 or 141-176, wherein the cell is obtained or prepared from bone marrow.

[1726] 187. The modified cell of any one claim 126-131 or 141-176, wherein the cell is obtained or prepared from umbilical cord blood.

[1727] 188. The modified cell of any one of claim 126-131 or 141-176, wherein the cell is obtained or prepared from peripheral blood.

[1728] 189. The modified cell of any one of claim 126-131 or 141-176, wherein the cell is obtained or prepared from peripheral blood mononuclear cells.

[1729] 190. The modified cell of any one of claim 126-131 or 141-176, wherein the cell is a human cell.

[1730] 191. The modified cell of any one of claim 126-131, 141-176 or 179-190, wherein the modified cell is transduced or transfected in vivo.

[1731] 192. The modified cell of any one of claim 126-131, 141-174 or 179-190, wherein the cell is transfected or transduced by the nucleic acid vector using a method selected from the group consisting of electroporation, sonoporation, biolistics (e.g., Gene Gun with Au-particles), lipid transfection, polymer transfection, nanoparticles, or polyplexes.

[1732] 193. A kit or composition comprising nucleic acid comprising
[1733] a) a first polynucleotide encoding a chimeric pro-apoptotic polypeptide, wherein the chimeric pro-apoptotic polypeptide comprises
   i) a pro-apoptotic polypeptide region; and
   ii) a FKBP12 variant polypeptide region; and
[1734] b) a second polynucleotide encoding a chimeric costimulating polypeptide, wherein the chimeric costimulating polypeptide comprises
   i) a FRB polypeptide or FRB variant polypeptide region;
   ii) a FKBP12 polypeptide region; and
   iii) a MyD88 polypeptide region or a truncated MyD88 polypeptide region lacking the TIR domain, or a MyD88 polypeptide region or a truncated MyD88 polypeptide region lacking the TIR domain and a CD40 cytoplasmic polypeptide region lacking the CD40 extracellular domain.

[1735] 194. The kit or composition of claim 193, wherein the chimeric costimulating polypeptide comprises a MyD88 polypeptide region or a truncated MyD88 polypeptide region lacking the TIR domain.

[1736] 195. The kit or composition of any one of claims 193-194, wherein the chimeric costimulating polypeptide comprises a truncated MyD88 polypeptide region lacking the TIR domain and a CD40 cytoplasmic polypeptide region lacking the CD40 extracellular domain.

[1737] 196. The kit or composition of any one of claims 193-195, further comprising a third polynucleotide, wherein the third polynucleotide encodes a heterologous protein.

[1738] 197. The kit or composition of claim 196, wherein the heterologous protein is a chimeric antigen receptor.

[1739] 198. The kit or composition of claim 196, wherein the heterologous protein is a recombinant TCR.

[1740] 199. The kit or composition of claim 193, wherein the nucleic acid is a nucleic acid of any one of claim 132-139, 142-174, or 177-178.

[1741] 200. The kit or composition of any one of claims 193-199, further comprising a third polynucleotide, wherein the third polynucleotide encodes a heterologous protein. 201. The kit or composition of 200, wherein the heterologous protein is a chimeric antigen receptor.

[1742] 202. The kit or composition of claim 200, wherein the heterologous protein is a recombinant TCR.

[1743] 203. The kit or composition of any one of claims 194-199, comprising a virus, wherein the virus comprises the first and the second polynucleotide.

[1744] 204. The kit or composition of any one of claims 199-202, comprising a virus, wherein the virus comprises the first, second, and third polynucleotides.

[1745] 205. The kit or composition of any one of claims 200-202, comprising a virus, wherein the virus comprises the first and third polynucleotides.

[1746] 206. The kit or composition of any one of claims 200-202, comprising a virus, wherein the virus comprises the second and third polynucleotides.

[1747] 207. The kit or composition of any one of claims 200-202, comprising a virus, wherein the virus comprises the first, second, and third polynucleotides.

[1748] 208. A method for expressing a chimeric pro-apoptotic polypeptide and a chimeric costimulating polypeptide, wherein
[1749] a) the chimeric pro-apoptotic polypeptide comprises
   [1750] i) a pro-apoptotic polypeptide region; and
   [1751] ii) a FKBP12 variant polypeptide region; and
[1752] b) the chimeric costimulating polypeptide comprises
[1753] c) a FRB or FRB variant polypeptide region;
[1754] d) a FKBP12 polypeptide region; and
[1755] e) a MyD88 polypeptide region or a truncated MyD88 polypeptide region lacking the TIR domain, or a MyD88 polypeptide region or a truncated MyD88 polypeptide region lacking the TIR domain and a CD40 cytoplasmic polypeptide region lacking the CD40 extracellular domain.
   comprising contacting a nucleic acid of any one of claim 132-139, 142-174, or 177-178 with a cell under conditions in which the nucleic acid is incorporated into the cell, whereby the cell expresses the chimeric pro-apoptotic polypeptide and the chimeric costimulating polypeptide from the incorporated nucleic acid.

[1756] 209. The method of claim 208, wherein the nucleic acid is contacted with the cell ex vivo.

[1757] 210. The method of claim 208, wherein the nucleic acid is contacted with the cell in vivo.

[1758] 211. A method of stimulating an immune response in a subject, comprising:
[1759] a) transplanting modified cells of any one of claim 126-131, 141-176, or 179-192 into the subject, and
[1760] b) after (a), administering an effective amount of a rapamycin or a rapalog that binds to the FRB polypeptide or FRB variant polypeptide region of the chimeric stimulating polypeptide to stimulate a cell mediated immune response.

[1761] 212. A method of administering a ligand to a subject who has undergone cell therapy using modified cells, comprising administering rapamycin or a rapalog to the subject, wherein the modified cells comprise modified cells of any one of claim 126-131, 141-176, or 179-192.

[1762] 213. A method of controlling activity of transplanted modified cells in a subject, comprising:
[1763] a) transplanting a modified cell of any one of claim 126-131, 141-176, or 179-192; and
[1764] b) after (a), administering an effective amount of rapamycin or a rapalog that binds to the FRB or FRB variant polypeptide region of the chimeric stimulating polypeptide to stimulate the activity of the transplanted modified cells.

[1765] 214. A method for treating a subject having a disease or condition associated with an elevated expression of a target antigen expressed by a target cell, comprising
[1766] a) transplanting an effective amount of modified cells into the subject; wherein the modified cells comprise a modified cell of any one of claim 126-131, 141-176, or 179-192, wherein the modified cell comprises a chimeric antigen receptor comprising an antigen recognition moiety that binds to the target antigen, and
[1767] b) after a), administering an effective amount of rapamycin or a rapalog that binds to the FRB polypeptide or FRB variant region of the chimeric stimulating polypeptide to reduce the number or concentration of target antigen or target cells in the subject.

[1768] 215. The method of claim 214, wherein the target antigen is a tumor antigen.

[1769] 216. A method for treating a subject having a disease or condition associated with an elevated expression of a target antigen expressed by a target cell, comprising
[1770] a) administering to the subject an effective amount of modified cells, wherein the modified cells comprise a modified cell of any one of claim 126-131, 141-176, or 179-192, wherein the modified cell comprises a recombinant T cell receptor that recognizes and binds to the target antigen, and
[1771] b) after a), administering an effective amount of rapamycin or a rapalog that binds to the FRB or FRB variant polypeptide region of the chimeric stimulating polypeptide to reduce the number or concentration of target antigen or target cells in the subject.

[1772] 217. A method for reducing the size of a tumor in a subject, comprising
[1773] a) administering a modified cell of any one of claim 126-131, 141-176, or 179-192 to the subject, wherein the cell comprises a chimeric antigen receptor comprising an antigen recognition moiety that binds to an antigen on the tumor; and
[1774] b) after a), administering an effective amount of rapamycin or a rapalog that binds to the FRB or FRB variant polypeptide region of the chimeric stimulating polypeptide to reduce the size of the tumor in the subject.

[1775] 218. The method of any one of claims 214-217, comprising measuring the number or concentration of target cells in a first sample obtained from the subject before administering second ligand, measuring the number or concentration of target cells in a second sample obtained from the subject after administering the ligand, and determining an increase or decrease of the number or concentration of target cells in the second sample compared to the number or concentration of target cells in the first sample.

[1776] 219. The method of claim 218, wherein the concentration of target cells in the second sample is decreased compared to the concentration of target cells in the first sample.

[1777] 220. The method of claim 218, wherein the concentration of target cells in the second sample is increased compared to the concentration of target cells in the first sample.

[1778] 221. The method of any one of claims 211-220, wherein the subject has received a stem cell transplant before or at the same time as administration of the modified cells.

[1779] 222. The method of any one of claims 211-221, wherein at least 1×106 transduced or transfected modified cells are administered to the subject.

[1780] 223. The method of any one of claims 211-221, wherein at least 1×107 transduced or transfected modified cells are administered to the subject.

[1781] 224. The method of any one of claims 211-221, wherein at least 1×108 modified cells are administered to the subject.

[1782] 225. The method of any one of claims 211-224, wherein the FKBP12 variant polypeptide region is FKBP12v36 and the ligand that binds to the FKBP12 variant polypeptide region is AP1903.

[1783] 226. A method of controlling survival of transplanted modified cells in a subject, comprising
[1784] a) transplanting modified cells of any one of claim 126-131, 141-176, or 179-192 into the subject, and
[1785] b) after (a), administering to the subject a ligand that binds to the FKBP12 variant polypeptide region of the chimeric pro-apoptotic polypeptide in an amount effective to kill less than 95% of the modified cells that express the chimeric pro-apoptotic polypeptide.

[1786] 227. The method of any one of claims 211-225, further comprising after (b), administering to the subject a ligand that binds to the FKBP12 variant polypeptide region of the chimeric pro-apoptotic polypeptide in an amount effective to kill less than 95% of the modified cells that express the chimeric pro-apoptotic polypeptide.

[1787] 228. The method of any one of claim 226 or 227, wherein a ligand that binds to the FKBP12 variant polypeptide region is administered in an amount effective to kill less than 40% of the modified cells that express the chimeric pro-apoptotic polypeptide.

[1788] 229. The method of any one of claim 226 or 227, wherein a ligand that binds to the FKBP12 variant polypeptide region is administered in an amount effective to kill less than 50% of the modified cells that express the chimeric pro-apoptotic polypeptide.

[1789] 230. The method of any one of claim 226 or 227, wherein the a ligand that binds to the FKBP12 variant polypeptide region is administered in an amount effective to kill less than 60% of the modified cells that express the chimeric pro-apoptotic polypeptide.

[1790] 231. The method of any one of claim 226 or 227, wherein the a ligand that binds to the FKBP12 variant polypeptide region is administered in an amount effective to kill less than 70% of the modified cells that express the chimeric pro-apoptotic polypeptide.

[1791] 232. The method of any one of claim 226 or 227, wherein the a ligand that binds to the FKBP12 variant polypeptide region is administered in an amount effective to kill less than 90% of the modified cells that express the chimeric pro-apoptotic polypeptide.

[1792] 233. The method of any one of claim 226 or 227, wherein the a ligand that binds to the FKBP12 variant polypeptide region is administered in an amount effective to kill at least 90% of the modified cells that express the chimeric pro-apoptotic polypeptide.

[1793] 234. The method of any one of claim 226 or 227, wherein the a ligand that binds to the FKBP12 variant polypeptide region is administered in an amount effective to kill at least 95% of the modified cells that express the chimeric pro-apoptotic polypeptide.

[1794] 235. The method of any one of claims 226-227, wherein the chimeric costimulating polypeptide comprises a FRBL region.

[1795] 236. The method of any one of claims 221-225, wherein more than one dose of the ligand is administered to the subject.

[1796] 237. The method of any one of claims 226-236, wherein more than one dose of the ligand that binds to the FKBP12 variant polypeptide region is administered to the subject.

[1797] 238. The method of any one of claims 211-236, further comprising identifying a presence or absence of a condition in the subject that requires the removal of the modified cells from the subject; and administering a ligand that binds to the FKBP12 variant polypeptide region, maintaining a subsequent dosage of the ligand, or adjusting a subsequent dosage of the ligand to the subject based on the presence or absence of the condition identified in the subject.

[1798] 239. The method of any one of claims 211-236, further comprising receiving information comprising presence or absence of a condition in the subject that requires the removal of the modified cells from the subject; and administering the a ligand that binds to the FKBP12 variant polypeptide region, maintaining a subsequent dosage of the ligand, or adjusting a subsequent dosage of the ligand to the subject based on the presence or absence of the condition identified in the subject.

[1799] 240. The method of any one of claims 211-236, further comprising identifying a presence or absence of a condition in the subject that requires the removal of the modified cells from the subject; and transmitting the presence, absence or stage of the condition identified in the subject to a decision maker who administers a ligand that binds to the FKBP12 variant polypeptide region, maintains a subsequent dosage of the ligand, or adjusts a subsequent dosage of the ligand administered to the subject based on the presence, absence or stage of the condition identified in the subject.

[1800] 241. The method of any one of claims 211-236, further comprising identifying a presence or absence of a condition in the subject that requires the removal of the modified cells from the subject; and transmitting an indication to administer the a ligand that binds to the FKBP12 variant polypeptide region, maintain a subsequent dosage of the ligand, or adjust a subsequent dosage of the ligand administered to the subject based on the presence, absence or stage of the condition identified in the subject.

[1801] 242. The method of any one of claims 211-241, wherein the subject has cancer.

[1802] 243. The method of any one of claims 211-241, wherein the modified cell is delivered to a tumor bed.

[1803] 244. The method of any one of claim 242 or 243, wherein the cancer is present in the blood or bone marrow of the subject.

[1804] 245. The method of any one of claims 211-241, wherein the subject has a blood or bone marrow disease.

[1805] 246. The method of any one of claims 211-241, wherein the subject has been diagnosed with sickle cell anemia or metachromatic leukodystrophy.

[1806] 247. The method of any one of claims 211-241, wherein the patient has been diagnosed with a condition selected from the group consisting of a primary immune deficiency condition, hemophagocytosis lymphohistiocytosis (HLH) or other hemophagocytic condition, an inherited marrow failure condition, a hemoglobinopathy, a metabolic condition, and an osteoclast condition.

[1807] 248. The method of any one of claims 211-241, wherein the patient has been diagnosed with a disease or condition selected from the group consisting of Severe Combined Immune Deficiency (SCID), Combined Immune Deficiency (CID), Congenital T-cell Defect/Deficiency, Common Variable Immune Deficiency (CVID), Chronic Granulomatous Disease, IPEX (Immune deficiency, polyendocrinopathy, enteropathy, X-linked) or IPEX-like, Wiskott-Aldrich Syndrome, CD40 Ligand Deficiency, Leukocyte Adhesion Deficiency, DOCA 8 Deficiency, IL-10 Deficiency/IL-10 Receptor Deficiency, GATA 2 deficiency, X-linked lymphoproliferative disease (XLP), Cartilage Hair Hypoplasia, Shwachman Diamond Syndrome, Diamond Blackfan Anemia, Dyskeratosis Congenita, Fanconi Anemia, Congenital Neutropenia, Sickle Cell Disease, Thalassemia, Mucopolysaccharidosis, Sphingolipidoses, and Osteopetrosis.

[1808] 249. A nucleic acid comprising a promoter operably linked to a polynucleotide coding for a chimeric pro-apoptotic polypeptide, wherein the chimeric pro-apoptotic polypeptide comprises
[1809] a) a pro-apoptotic polypeptide region;
[1810] b) a FKBP12-Rapamycin binding domain (FRB) polypeptide or FRB variant polypeptide region; and
[1811] c) a FKBP12 variant polypeptide region.

[1812] 250. The nucleic acid of claim 249, wherein the order of regions (a), (b), and (c), from the amino terminus to the carboxyl terminus of the chimeric pro-apoptotic polypeptide is (c), (b), (a).

[1813] 251. The nucleic acid of claim 249, wherein the order of regions (a), (b), and (c), from the amino terminus to the carboxyl terminus of the chimeric pro-apoptotic polypeptide is (b), (c), (a).

[1814] 252. The nucleic acid of any one of claim 250 or 251, wherein (b) and (c) are amino terminal to the pro-apoptotic polypeptide.

[1815] 253. The nucleic acid of any one of claim 250 or 251, wherein (b) and (c) are carboxyl terminal to the pro-apoptotic polypeptide.

[1816] 254. The nucleic acid of any one of claims 259 to 253, wherein the chimeric pro-apoptotic polypeptide further comprises linker polypeptides between regions (a), (b), and (c).

[1817] 255. The nucleic acid of any one of claims 249-254, wherein the FKBP12 variant polypeptide region binds to a ligand with at least 100 times more affinity than the ligand binds to a wild type FKBP12 polypeptide region.

[1818] 256. The nucleic acid of any one of claims 249-254, wherein the FKBP12 variant polypeptide region binds to a ligand with at least 500 times more affinity than the ligand binds to the a wild type FKBP12 polypeptide region.

[1819] 257. The nucleic acid of any one of claims 249-254, wherein the FKBP12 variant polypeptide region binds to a ligand with at least 1000 times more affinity than the ligand binds to a wild type FKBP12 polypeptide region.

[1820] 258. The nucleic acid of any one of claims 249-257, wherein the FKBP12 variant comprises an amino acid substitution at amino acid residue 36.

[1821] 259. The nucleic acid of claim 258, wherein the amino acid substitution at position 36 selected from the group consisting of valine, leucine, isoleuceine and alanine.

[1822] 260. The nucleic acid of any one of claims 249-259, wherein the FKBP12 variant polypeptide region is a FKBP12v36 polypeptide region.

[1823] 261. The nucleic acid of any one of claims 255-260, wherein the ligand is rimiducid. 262. The nucleic acid of any one of claims 255-260, wherein the ligand is AP20187 or N1510.

[1824] 263. The nucleic acid of any one of claims 249-262, wherein the FRB variant polypeptide binds to a C7 rapalog.

[1825] 264. The nucleic acid of any one of claims 249-263, wherein the FRB variant polypeptide comprises an amino acid substitution at position T2098 or W2101.

[1826] 265. The nucleic acid of any one of claims 249-264, wherein the FRB variant polypeptide region is selected from the group consisting of KLW (T2098L) (FRBL), KTF (W2101F), and KLF (T2098L, W2101F).

[1827] 266. The nucleic acid of any one of claims 249-265, wherein the FRB variant polypeptide region is FRBL.

[1828] 267. The nucleic acid of any one of claims 249-266, wherein the FRB variant polypeptide region binds to a rapalog selected from the group consisting of S-o,p-dimethoxyphenyl (DMOP)-rapamycin, R-Isopropoxyrapamycin, C7-Isobutyloxyrapamycin, and S-Butanesulfonamidorap.

[1829] 268. The nucleic acid of any one of claims 249-267, wherein the promoter is operably linked to a second polynucleotide, wherein the second polynucleotide encodes a heterologous protein.

[1830] 269. The nucleic acid of claim 268, wherein the heterologous protein is a chimeric antigen receptor.

[1831] 270. The nucleic acid of claim 268, wherein the heterologous protein is a recombinant TCR.

[1832] 271. The nucleic acid of any one of claims 249-268, wherein the nucleic acid further comprises a polynucleotide encoding a linker polypeptide between the polynucleotide that encodes the chimeric pro-apoptotic polypeptide and the second polynucleotide, wherein the linker polypeptide separates the translation products of the first and second polynucleotides during or after translation.

[1833] 272. The nucleic acid of claim 271, wherein the linker polypeptide is a 2A polypeptide.

[1834] 273. The nucleic acid of any one of claim 269, or 271-272, wherein the chimeric antigen receptor comprises (i) a transmembrane region, (ii) a T cell activation molecule, and (iii) an antigen recognition moiety.

[1835] 274. The nucleic acid of claim 273, wherein the T cell activation molecule is selected from the group consisting of an ITAM-containing, Signal 1 conferring molecule, a Syk polypeptide, a ZAP70 polypeptide, a CD3 Z polypeptide, and an Fc epsilon receptor gamma (FcεR1γ) subunit polypeptide.

[1836] 275. The nucleic acid of claim 273, wherein the T cell activation molecule is selected from the group consisting of an ITAM-containing, Signal 1 conferring molecule, a CD3 ζ polypeptide, and an Fc epsilon receptor gamma (FcεR1γ) subunit polypeptide.N23.

[1837] 276. The nucleic acid of any one of claims 273-275, wherein the antigen recognition moiety is a single chain variable fragment.

[1838] 277. The nucleic acid of any one of claims 273-276, wherein the transmembrane region is a CD8 transmembrane region.

[1839] 278. The nucleic acid of any one of claims 273-277, wherein the antigen recognition moiety binds to an antigen selected from the group consisting of an antigen on a tumor cell, an antigen on a cell involved in a hyperproliferative disease, a viral antigen, a bacterial antigen, CD19, PSCA, Her2/Neu, PSMA, Muc1Muc1, Muc1, ROR1, Mesothelin, GD2, CD123, Muc16, CD33, CD38, and CD44v6.

[1840] 279. The nucleic acid of any one of claims 273-277 wherein the antigen recognition moiety binds to an antigen selected from the group consisting of an antigen on a tumor cell, an antigen on a cell involved in a hyperproliferative disease, a viral antigen, a bacterial antigen, CD19, PSCA, Her2/Neu, PSMA, Muc1Muc1, Muc1, ROR1, Mesothelin, GD2, CD123, Muc16, CD33, CD38, and CD44v6.

[1841] 280. The nucleic acid of any one of claims 270-272, wherein the recombinant T cell receptor binds to an antigenic polypeptide selected from the group consisting of PRAME, Bob-1, and NY-ESO-1.

[1842] 281. The nucleic acid of any one of claims 249-280, further comprising a polynucleotide encoding a chimeric costimulatory polypeptide comprising a MyD88 polypeptide region or a truncated MyD88 polypeptide region lacking the TIR domain.

[1843] 282. The nucleic acid of claim 281, wherein the chimeric costimulatory polypeptide further comprises a CD40 cytoplasmic polypeptide lacking the CD40 extracellular domain.

[1844] 283. The nucleic acid of any one of claims 281-282, wherein the chimeric costimulatory polypeptide further comprises a membrane targeting region.

[1845] 284. The nucleic acid of claim 283, wherein the membrane targeting region comprises a myristoylation region.

[1846] 285. The nucleic acid of any one of claims 282-284, wherein the truncated MyD88 polypeptide has the amino acid sequence of SEQ ID NO: 214 or 969, or a functional fragment thereof.

[1847] 286. The nucleic acid of any one of claims 282-284, wherein the MyD88 polypeptide has the amino acid sequence of SEQ ID NO: 282, or a functional fragment thereof. 287. The nucleic acid of any one of claims 282-286, wherein the cytoplasmic CD40 polypeptide has the amino acid sequence of SEQ ID NO: 216, or a functional fragment thereof.

[1848] 288. The nucleic acid of any one of claims 249-287, wherein the pro-apoptotic polypeptide is selected from the group consisting of Caspase 1, 2, 3, 4, 5, 6, 7, 8, 9, 10, 11, 12, 13, or 14, FADD (DED), APAF1 (CARD), CRADD/RAIDD CARD), ASC (CARD), Bax, Bak, Bcl-xL, Bcl-2, RIPK3, and RIPK1-RHIM.

[1849] 289. The nucleic acid of any one of claims 249-288, wherein the pro-apoptotic polypeptide is a caspase polypeptide.

[1850] 290. The nucleic acid of claim 289, wherein the pro-apoptotic polypeptide is a Caspase-9 polypeptide.

[1851] 291. The nucleic acid of cell of claim 290, wherein the Caspase-9 polypeptide lacks the CARD domain.

[1852] 292. The nucleic acid of any one of claim 289 or 290, wherein the caspase polypeptide comprises the amino acid sequence of SEQ ID NO: 300.

[1853] 293. The nucleic acid of any one of claims 289-290, wherein the caspase polypeptide is a modified Caspase-9 polypeptide comprising an amino acid substitution selected from the group consisting of the catalytically active caspase variants in Tables 5 or 6.

[1854] 294. The nucleic acid of claim 294, wherein the caspase polypeptide is a modified Caspase-9 polypeptide comprising an amino acid sequence selected from the group consisting of D330A, D330E, and N405Q.

[1855] 295. The nucleic acid of any one of claims 249-294, wherein, the chimeric pro-apoptotic polypeptide comprises a Caspase-9 polypeptide lacking the CARD domain, a FKBP12v36 polypeptide region; and a FRB_{L} polypeptide region.

[1856] 296. A chimeric pro-apoptotic polypeptide encoded by a nucleic acid of any one of claims 249-295.

[1857] 297. A modified cell transfected or transduced with a nucleic acid of any one of claims 249-295.

[1858] 298. The modified cell of claim 297, wherein the modified cell comprises a polynucleotide that encodes a chimeric antigen receptor.

[1859] 299. The modified cell of claim 297, wherein the modified cell comprises a polynucleotide that encodes a recombinant TCR.

[1860] 300. The modified cell of claim 298, wherein the chimeric antigen receptor comprises (i) a transmembrane region, (ii) a T cell activation molecule, and (iii) an antigen recognition moiety.

[1861] 301. The modified cell of claim 300, wherein the T cell activation molecule is selected from the group consisting of an ITAM-containing, Signal 1 conferring molecule, a Syk polypeptide, a ZAP70 polypeptide, a CD3 Z polypeptide, and an Fc epsilon receptor gamma (FcεR1γ) subunit polypeptide.

[1862] 302. The modified cell of claim 300, wherein the T cell activation molecule is selected from the group consisting of an ITAM-containing, Signal 1 conferring molecule, a CD3 ζ polypeptide, and an Fc epsilon receptor gamma (FcεR1γ) subunit polypeptide.P6.

[1863] 303. The modified cell of any one of claims 300-302, wherein the antigen recognition moiety is a single chain variable fragment.

[1864] 304. The modified cell of any one of claims 300-303, wherein the transmembrane region is a CD8 transmembrane region.

[1865] 305. The modified cell of any one of claims 300-304, wherein the antigen recognition moiety binds to an antigen selected from the group consisting of an antigen on a tumor cell, an antigen on a cell involved in a hyperproliferative disease, a viral antigen, a bacterial antigen, CD19, PSCA, Her2/Neu, PSMA, Muc1Muc1, Muc1, ROR1, Mesothelin, GD2, CD123, Muc16, CD33, CD38, and CD44v6.

[1866] 306. The modified cell of any one of claims 300-304 wherein the antigen recognition moiety binds to an antigen selected from the group consisting of an antigen on a tumor cell, an antigen on a cell involved in a hyperproliferative disease, a viral antigen, a bacterial antigen, CD19, PSCA, Her2/Neu, PSMA, Muc1Muc1, Muc1, ROR1, Mesothelin, GD2, CD123, Muc16, CD33, CD38, and CD44v6.

[1867] 307. The modified cell of claim 299, wherein the recombinant T cell receptor binds to an antigenic polypeptide selected from the group consisting of PRAME, Bob-1, and NY-ESO-1.

[1868] 308. The modified cell of claim 297, wherein the modified cell comprises a polynucleotide that encodes a MyD88 polypeptide or a truncated MyD88 polypeptide region lacking the TIR domain.

[1869] 309. The modified cell of claim 308, wherein the modified cell comprises a polynucleotide that encodes a chimeric costimulating polypeptide, wherein the chimeric costimulating polypeptide encodes a MyD88 polypeptide or a truncated MyD88 polypeptide region lacking the TIR domain and a CD40 cytoplasmic polypeptide lacking the CD40 extracellular domain.

[1870] 310. The modified cell of any one of claims 308-309, wherein the truncated MyD88 polypeptide has the amino acid sequence of SEQ ID NO: 214 or 969, or a functional fragment thereof.

[1871] 311. The modified cell of any one of claims 308-310, wherein the MyD88 polypeptide has the amino acid sequence of SEQ ID NO: 282, or a functional fragment thereof.

[1872] 312. The modified cell of any one of claims 309-311, wherein the cytoplasmic CD40 polypeptide has the amino acid sequence of SEQ ID NO: 216, or a functional fragment thereof.

[1873] 313. The modified cell of any one of claims 297-312, wherein the cell is a T cell, tumor infiltrating lymphocyte, NK-T cell, or NK cell.

[1874] 314. The modified cell of any one of claims 297-312, wherein the cell is a T cell, NK-T cell, or NK cell.

[1875] 315. The modified cell of any one of claims 297-312, wherein the cell is a T cell.

[1876] 316. The modified cell of any one of claims 297-312, wherein the cell is a primary T cell.

[1877] 317. The modified cell of any one of claims 297-312, wherein the cell is a cytotoxic T cell.

[1878] 318. The modified cell of any one of claims 297-312, wherein the cell is selected from the group consisting of embryonic stem cell (ESC), inducible pluripotent stem cell (iPSC), non-lymphocytic hematopoietic cell, non-hematopoietic cell, macrophage, keratinocyte, fibroblast, melanoma cell, tumor infiltrating lymphocyte, natural killer cell, natural killer T cell, or T cell.

[1879] 319. The modified cell of any one of claims 297-312, wherein the T cell is a helper T cell.

[1880] 320. The modified cell of any one of claims 297-312, wherein the cell is obtained or prepared from bone marrow.

[1881] 321. The modified cell of any one claims 297-312, wherein the cell is obtained or prepared from umbilical cord blood.

[1882] 322. The modified cell of any one of claims 297-312, wherein the cell is obtained or prepared from peripheral blood.

[1883] 323. The modified cell of any one of claims 297-312, wherein the cell is obtained or prepared from peripheral blood mononuclear cells.

[1884] 324. The modified cell of any one of claims 297-323, wherein the cell is a human cell.

[1885] 325. The modified cell of any one of claims 297-324, wherein the modified cell is transduced or transfected in vivo.

[1886] 326. The modified cell of any one of claims 297-325, wherein the cell is transfected or transduced by the nucleic acid vector using a method selected from the group consisting of electroporation, sonoporation, biolistics (e.g., Gene Gun with Au-particles), lipid transfection, polymer transfection, nanoparticles, or polyplexes.

[1887] 327. A kit or composition comprising nucleic acid comprising a polynucleotide coding for a chimeric pro-apoptotic polypeptide, wherein the chimeric pro-apoptotic polypeptide comprises
[1888] a) a pro-apoptotic polypeptide region;
[1889] b) a FKBP12-Rapamycin binding domain (FRB) polypeptide or FRB variant polypeptide region; and
[1890] c) a FKBP12 variant polypeptide region.

[1891] 328. The kit or composition of claim 327, wherein the FKBP12 variant comprises an amino acid substitution at amino acid residue 36.

[1892] 329. The kit or composition of claim 328, wherein the amino acid substitution at position 36 selected from the group consisting of valine, leucine, isoleuceine and alanine.

[1893] 330. The kit or composition of any one of claims 327-329, wherein the FKBP12 variant polypeptide region is a FKBP12v36 polypeptide region.

[1894] 331. The kit or composition of any one of claims 327-330, wherein the FKBP12 variant polypeptide region binds to rimiducid.

[1895] 332. The kit or composition of any one of claims 327-331, wherein the FKBP12 variant polypeptide region binds to AP20187 of AP1510.

[1896] 333. The kit or composition of any one of claims 327-332, wherein the FRB variant polypeptide binds to a C7 rapalog.

[1897] 334. The kit or composition of any one of claims 327-333, wherein the FRB variant polypeptide comprises an amino acid substitution at position T2098 or W2101.

[1898] 335. The kit or composition of any one of claims 327-334, wherein the FRB variant polypeptide region is selected from the group consisting of KLW (T2098L) (FRBL), KTF (W2101F), and KLF (T2098L, W2101F).

[1899] 336. The kit or composition of any one of claims 327-335, wherein the FRB variant polypeptide region is FRBL.

[1900] 337. The kit or composition of any one of claims 327-336, wherein the FRB variant polypeptide region binds to a rapalog selected from the group consisting of S-o,p-dimethoxyphenyl (DMOP)-rapamycin, R-Isopropoxyrapamycin, C7-Isobutyloxyrapamycin, and S-Butanesulfonamidorap.

[1901] 338. The kit or composition of any one of claims 327-337, wherein the nucleic acid is a nucleic acid of any one of claims 249-N41.

[1902] 339. A method for expressing a chimeric pro-apoptotic polypeptide, wherein the chimeric pro-apoptotic polypeptide comprises
[1903] a) a pro-apoptotic polypeptide region;
[1904] b) a FRB or FRB variant polypeptide region; and
[1905] c) a FKBP12 variant polypeptide region.
   comprising contacting a nucleic acid of any one of claims 249-295 with a cell under conditions in which the nucleic acid is incorporated into the cell, whereby the cell expresses the chimeric pro-apoptotic polypeptide and the chimeric costimulating polypeptide from the incorporated nucleic acid.

[1906] 340. The method of claim 339, wherein the nucleic acid is contacted with the cell ex vivo.

[1907] 341. The method of claim 339, wherein the nucleic acid is contacted with the cell in vivo.

[1908] 342. A method of controlling survival of transplanted modified cells in a subject, comprising:
[1909] a) transplanting modified cells of any one of claims 297 to 326 into the subject; and
[1910] b) after (a), administering to the subject
   [1911] i) a first ligand that binds to the FRB or FRB variant polypeptide region of the chimeric pro-apoptotic polypeptide; or
   [1912] ii) a second ligand that binds to the FKBP12 variant polypeptide region of the chimeric pro-apoptotic polypeptide wherein the first ligand or the second ligand are administered in an amount effective to kill at least 30% of the modified cells that express the chimeric pro-apoptotic polypeptide.

[1913] 343. The method of claim 342, wherein the first ligand or the second ligand are administered in an amount effective to kill at least 40% of the modified cells that express the chimeric pro-apoptotic polypeptide.

[1914] 344. The method of claim 342, wherein the first ligand or the second ligand are administered in an amount effective to kill at least 50% of the modified cells that express the chimeric pro-apoptotic polypeptide.

[1915] 345. The method of claim 342, wherein the first ligand or the second ligand are administered in an amount effective to kill at least 60% of the modified cells that express the chimeric pro-apoptotic polypeptide.

[1916] 346. The method of claim 342, wherein the first ligand or the second ligand are administered in an amount effective to kill at least 70% of the modified cells that express the chimeric pro-apoptotic polypeptide.

[1917] 347. The method of claim 342, wherein the first ligand or the second ligand are administered in an amount effective to kill at least 80% of the modified cells that express the chimeric pro-apoptotic polypeptide.

[1918] 348. The method of claim 342, wherein the first ligand or the second ligand are administered in an amount effective to kill at least 90% of the modified cells that express the chimeric pro-apoptotic polypeptide.

[1919] 349. The method of claim 342, wherein the first ligand or the second ligand are administered in an amount effective to kill at least 95% of the modified cells that express the chimeric pro-apoptotic polypeptide.

[1920] 350. The method of claim 342, wherein the first ligand or the second ligand are administered in an amount effective to kill at least 99% of the modified cells that express the chimeric pro-apoptotic polypeptide.

[1921] 351. A method of administering a first ligand or a second ligand to a subject who has undergone cell therapy using modified cells that express a chimeric pro-apoptotic polypeptide, wherein the modified cells comprise a nucleic acid of any one of claims 249-N45, wherein the first ligand or the second ligand is administered in an amount effective to kill at least 30% of the modified cells that express the chimeric pro-apoptotic polypeptide.

[1922] 352. The method of claim 351, wherein the first ligand binds to the FRB or FRB variant polypeptide region and the second ligand binds to the FKBP12 variant polypeptide region of the chimeric pro-apoptotic polypeptide.

[1923] 353. The method of any one of claims 351-352, wherein the first ligand or the second ligand are administered in an amount effective to kill less at least 40% of the modified cells that express the chimeric pro-apoptotic polypeptide.

[1924] 354. The method of any one of claims 351-352, wherein the first ligand or the second ligand are administered in an amount effective to kill less at least 50% of the modified cells that express the chimeric pro-apoptotic polypeptide.

[1925] 355. The method of any one of claims 351-352, wherein the first ligand or the second ligand are administered in an amount effective to kill less at least 60% of the modified cells that express the chimeric pro-apoptotic polypeptide.

[1926] 356. The method of any one of claims 351-352, wherein the first ligand or the second ligand are administered in an amount effective to kill less at least 70% of the modified cells that express the chimeric pro-apoptotic polypeptide.

[1927] 357. The method of any one of claims 351-352, wherein the first ligand or the second ligand are administered in an amount effective to kill less at least 80% of the modified cells that express the chimeric pro-apoptotic polypeptide.

[1928] 358. The method of any one of claims 351-352, wherein the first ligand or the second ligand are administered in an amount effective to kill at least 90% of the modified cells that express the chimeric pro-apoptotic polypeptide.

[1929] 359. The method of any one of claims 351-352, wherein the first ligand or the second ligand are administered in an amount effective to kill at least 95% of the modified cells that express the chimeric pro-apoptotic polypeptide.

[1930] 360. The method of any one of claims 351-352, wherein the first ligand or the second ligand are administered in an amount effective to kill at least 99% of the modified cells that express the chimeric pro-apoptotic polypeptide.

[1931] 361. The method of any one of claims 342-360, wherein more than one dose of the ligand is administered to the subject.

[1932] 362. The method of any one of claims 342-361, wherein the first ligand is rapamycin or a rapalog.

[1933] 363. The method of claim 362, wherein the first ligand is a rapalog selected from the group consisting of S-o,p-dimethoxyphenyl (DMOP)-rapamycin, R-Isopropoxyrapamycin, C7-Isobutyloxyrapamycin, and S-Butanesulfonamidorap.

[1934] 364. The method of any one of claims 342-360, wherein the second ligand is rimiducid, AP20187, or AP1510.

[1935] 365. The method of claim 364, wherein the second ligand is rimiducid.

[1936] 366. The method of any one of claims 342-365, wherein more than one dose of the first ligand or the second ligand is administered.

[1937] 367. The method of any one of claims 342-366, wherein both the first ligand and the second ligand are administered.

[1938] 368. The method of any one of claims 342-367, further comprising identifying a presence or absence of a condition in the subject that requires the removal of modified cells from the subject; and administering the first or the second ligand, or maintaining a subsequent dosage of the first or the second ligand, or adjusting a subsequent dosage of the first or second ligand to the subject based on the presence or absence of the condition identified in the subject.

[1939] 369. The method of any one of claims 342-367, further comprising identifying a presence or absence of a condition in the subject that requires the removal of transfected or transduced therapeutic cells from the subject; and determining whether the first or the second ligand should be administered to the subject, or the dosage of the first or the second ligand subsequently administered to the subject is adjusted based on the presence or absence of the condition identified in the subject.

[1940] 370. The method of any one of claims 342-369, further comprising receiving information comprising presence or absence of a condition in the subject that requires the removal of transfected or transduced modified cells from the subject; and administering the first ligand or the second ligand, maintaining a subsequent dosage of the first ligand or the second ligand, or adjusting a subsequent dosage of the first ligand or the second ligand to the subject based on the presence or absence of the condition identified in the subject.

[1941] 371. The method of any one of claims 342-369, further comprising identifying a presence or absence of a condition in the subject that requires the removal of transfected or transduced modified cells from the subject; and transmitting the presence, absence or stage of the condition identified in the subject to a decision maker who administers the first ligand or the second ligand, maintains a subsequent dosage of the first ligand or the second ligand, or adjusts a subsequent dosage of the first ligand or the second ligand administered to the subject based on the presence, absence or stage of the condition identified in the subject.

[1942] 372. The method of any one of claims 342-39, further comprising identifying a presence or absence of a condition in the subject that requires the removal of transfected or transduced modified cells from the subject; and transmitting an indication to administer the first ligand or the second ligand, maintain a subsequent dosage of the first ligand or the second ligand, or adjusts a subsequent dosage of the first ligand or the second ligand administered to the subject based on the presence, absence or stage of the condition identified in the subject.

[1943] 373. The method of any one of claims 342-369, wherein alloreactive modified cells are present in the subject and the number of alloreactive modified cells is reduced by at least 90% after administration of the first ligand or the second ligand.

[1944] 374. The method of any one of claims 342-369, wherein at least 1×10⁶ transduced or transfected modified cells are administered to the subject.

[1945] 375. The method of any one of claims 342-373, wherein at least 1×10⁷ transduced or transfected modified cells are administered to the subject.

[1946] 376. The method of any one of claims 342-373, wherein at least 1×10⁸ transduced or transfected modified cells are administered to the subject.

[1947] 377. The method of any one of claims 342-373, further comprising identifying the presence, absence or stage of graft versus host disease in the subject, and administering the first ligand or the second ligand, maintaining a subsequent dosage of the first ligand or the second ligand, or adjusting a subsequent dosage of the first ligand or the second ligand to the subject based on the presence, absence or stage of the graft versus host disease identified in the subject.

[1948] 378. A method of administering a ligand to a subject who has undergone cell therapy using modified cells comprising administering the ligand to the subject, wherein the modified cells comprise a modified cell of any one of claims 297-326, wherein the ligand binds to a FKBP12 variant polypeptide region.

[1949] 379. A method of administering rapamycin or a rapalog to a subject who has undergone cell therapy using modified cells comprising administering rapamycin or a rapalog to the subject, wherein the modified cells comprise a modified cell of any one of claims 297-326, wherein the rapamycin or rapalog binds to a FRB polypeptide or FRB variant polypeptide region.

[1950] 380. The method of claim 378, wherein the ligand is selected from the group consisting of rapamycin, AP20187, and AP1510.

[1951] 381. The method of any one of claims 342-179, wherein at least 30% of cells expressing the chimeric pro-apoptotic polypeptide are killed within 24 hours of administering the first ligand or the second ligand.

[1952] 382. The method of claim 381, wherein at least 40% of cells expressing the chimeric pro-apoptotic polypeptide are killed within 24 hours of administering the first ligand or the second ligand.

[1953] 383. The method of claim 381, wherein at least 50% of cells expressing the chimeric pro-apoptotic polypeptide are killed within 24 hours of administering the first ligand or the second ligand.

[1954] 384. The method of claim 381, wherein at least 60% of cells expressing the chimeric pro-apoptotic polypeptide are killed within 24 hours of administering the first ligand or the second ligand.

[1955] 385. The method of claim 381, wherein at least 70% of cells expressing the chimeric pro-apoptotic polypeptide are killed within 24 hours of administering the first ligand or the second ligand.

[1956] 386. The method of claim 381, wherein at least 80% of cells expressing the chimeric pro-apoptotic polypeptide are killed within 24 hours of administering the first ligand or the second ligand.

[1957] 387. The method of claim 381, wherein at least 90% of cells expressing the chimeric pro-apoptotic polypeptide are killed within 24 hours of administering the first ligand or the second ligand.

[1958] 388. The method of claim 381, wherein at least 95% of cells expressing the chimeric pro-apoptotic polypeptide are killed within 24 hours of administering the first ligand or the second ligand.

[1959] 389. The method of any one of claims 381-388, wherein at least 30%, at last 40%, at least 50%, at least 60%, at least 70%, at least 80%, at least 90% or at least 95% of cells expressing the chimeric pro-apoptotic polypeptide are killed within 90 minutes of administering the first ligand or the second ligand.

[1960] 390. The method of any one of claims 342-389, wherein
[1961] a) the first ligand is administered to the subject, followed by the second ligand, or
[1962] b) the second ligand is administered to the subject, followed by the first ligand.

[1963] 391. The method of any one of claims 342-390, wherein the subject is human.

[1964] 392. The method of any one of claims 342-391, wherein the subject is selected from the group consisting of non-human primate, mouse, pig, cow, goat, rabbit, rat, guinea pig, hamster, horse, monkey, sheep, bird, and fish.

[1965] The entirety of each patent, patent application, publication and document referenced herein hereby is incorporated by reference. Citation of the above patents, patent applications, publications and documents is not an admission that any of the foregoing is pertinent prior art, nor does it constitute any admission as to the contents or date of these publications or documents.

[1966] Modifications may be made to the foregoing without departing from the basic aspects of the technology. Although the technology has been described in substantial detail with reference to one or more specific embodiments, those of ordinary skill in the art will recognize that changes may be made to the embodiments specifically disclosed in this application, yet these modifications and improvements are within the scope and spirit of the technology.

[1967] The technology illustratively described herein suitably may be practiced in the absence of any element(s) not specifically disclosed herein. Thus, for example, in each instance herein any of the terms “comprising,” “consisting essentially of,” and “consisting of” may be replaced with either of the other two terms. The terms and expressions which have been employed are used as terms of description and not of limitation, and use of such terms and expressions do not exclude any equivalents of the features shown and described or portions thereof, and various modifications are possible within the scope of the technology claimed. The term “a” or “an” can refer to one of or a plurality of the elements it modifies (e.g., “a reagent” can mean one or more reagents) unless it is contextually clear either one of the elements or more than one of the elements is described. The term “about” as used herein refers to a value within 10% of the underlying parameter (i.e., plus or minus 10%), and use of the term “about” at the beginning of a string of values modifies each of the values (i.e., “about 1, 2 and 3” refers to about 1, about 2 and about 3). For example, a weight of “about 100 grams” can include weights between 90 grams and 110 grams. Further, when a listing of values is described herein (e.g., about 50%, 60%, 70%, 80%, 85% or 86%) the listing includes all intermediate and fractional values thereof (e.g., 54%, 85.4%). Thus, it should be understood that although the present technology has been specifically disclosed by representative embodiments and optional features, modification and variation of the concepts herein disclosed may be resorted to by those skilled in the art, and such modifications and variations are considered within the scope of this technology.

[1968] Certain embodiments of the technology are set forth in the claim(s) that follow(s).

1. A modified cell, comprising
a) a first polynucleotide encoding a chimeric pro-apoptotic polypeptide, wherein the chimeric pro-apoptotic polypeptide comprises
(i) a pro-apoptotic polypeptide region;
(ii) a FKBP12-Rapamycin-Binding (FRB) domain polypeptide, or FRB variant polypeptide region; and
(iii) a FKBP12 or FKBP12 variant polypeptide region (FKBP12v); and
b) a second polynucleotide encoding a chimeric costimulating polypeptide, wherein the chimeric costimulating polypeptide comprises two FKBP12 variant polypeptide regions and
i) a MyD88 polypeptide region or a truncated MyD88 polypeptide region lacking the TIR domain; or
ii) a MyD88 polypeptide region or a truncated MyD88 polypeptide region lacking the TIR domain, and a CD40 cytoplasmic polypeptide region lacking the CD40 extracellular domain.

2. The modified cell of claim 1, wherein the chimeric costimulating polypeptide comprises two FKBP12 variant polypeptide regions, a truncated MyD88 polypeptide region lacking the TIR domain, and a CD40 cytoplasmic polypeptide region lacking the CD40 extracellular domain.

3. The modified cell of claim 1, wherein the cell further comprises a third polynucleotide encoding a chimeric antigen receptor or a recombinant T cell receptor.

4. A nucleic acid comprising a promoter operably linked to
a) a first polynucleotide encoding a chimeric pro-apoptotic polypeptide, wherein the chimeric pro-apoptotic polypeptide comprises
(i) a pro-apoptotic polypeptide region;
(ii) a FKBP12-Rapamycin-Binding (FRB) domain polypeptide, or FRB variant polypeptide region; and
(iii) a FKBP12 or FKBP12 variant polypeptide region (FKBP12v); and
b) a second polynucleotide encoding a chimeric costimulating polypeptide, wherein the chimeric costimulating polypeptide comprises two FKBP12 variant polypeptide regions and
i) a MyD88 polypeptide region or a truncated MyD88 polypeptide region lacking the TIR domain; or
ii) a MyD88 polypeptide region or a truncated MyD88 polypeptide region lacking the TIR domain, and a CD40 cytoplasmic polypeptide region lacking the CD40 extracellular domain.

5. The nucleic acid of claim 4, wherein the chimeric costimulating polypeptide comprises a truncated MyD88 polypeptide region lacking the TIR domain and a CD40 cytoplasmic polypeptide region lacking the CD40 extracellular domain.

6. (canceled)

7. The nucleic acid of claim 4, wherein the pro-apoptotic polypeptide is a Caspase-9 polypeptide, wherein the Caspase-9 polypeptide lacks the CARD domain.

8. The modified cell of claim 1, wherein the cell is a T cell, tumor infiltrating lymphocyte, NK-T cell, or NK cell.

9. (canceled)

10. (canceled)

11. A method of stimulating an immune response in a subject, comprising:
a) transplanting modified cells of claim 1 into the subject, and
b) after (a), administering an effective amount of a ligand that binds to the FKBP12 variant polypeptide region of the chimeric costimulating polypeptide to stimulate a cell mediated immune response.

12. A method of administering a ligand to a subject who has undergone cell therapy using modified cells, comprising administering a ligand that binds to the FKBP variant region of the chimeric costimulating polypeptide to the human subject, wherein the modified cells comprise modified cells of claim 1.

13. A method for treating a subject having a disease or condition associated with an elevated expression of a target antigen expressed by a target cell, comprising
a) transplanting an effective amount of modified cells into the subject; wherein the modified cells comprise a modified cell of claim 1, wherein the modified cell comprises a chimeric antigen receptor or a recombinant T cell receptor comprising an antigen recognition moiety that binds to the target antigen, and
b) after a), administering an effective amount of a ligand that binds to the FKBP12 variant polypeptide region of the chimeric costimulating polypeptide to reduce the number or concentration of target antigen or target cells in the subject.

14. A method for reducing the size of a tumor in a subject, comprising
a) administering a modified cell of claim 1 to the subject, wherein the cell comprises a chimeric antigen receptor or a recombinant T cell receptor comprising an antigen recognition moiety that binds to an antigen on the tumor; and
b) after a), administering an effective amount of a ligand that binds to the FKBP12 variant polypeptide region of the chimeric costimulating polypeptide to reduce the size of the tumor in the subject.

15. A method of controlling survival of transplanted modified cells in a subject, comprising
a) transplanting modified cells of claim 1 into the subject; and
b) after a), administering to the subject rapamycin or a rapalog that binds to the FRB polypeptide or FRB variant polypeptide region of the chimeric pro-apoptotic polypeptide in an amount effective to kill at least 30% of the modified cells that express the chimeric pro-apoptotic polypeptide.

16. A modified cell comprising
a) a first polynucleotide encoding a chimeric pro-apoptotic polypeptide, wherein the chimeric pro-apoptotic polypeptide comprises
i) a pro-apoptotic polypeptide region; and
ii) a FKBP12 variant polypeptide region; and
b) a second polynucleotide encoding a chimeric costimulating polypeptide, wherein the chimeric costimulating polypeptide comprises
i) a FKBP12-Rapamycin Binding (FRB) domain polypeptide or FRB variant polypeptide region;
ii) a FKBP12 polypeptide or FKBP12 variant polypeptide region; and
iii) a MyD88 polypeptide region or a truncated MyD88 polypeptide region lacking the TIR domain, or a MyD88 polypeptide region, or a truncated MyD88 polypeptide region lacking the TIR domain and a CD40 cytoplasmic polypeptide region lacking the CD40 extracellular domain.

17. The modified cell of claim 16, wherein the chimeric costimulating polypeptide comprises a truncated MyD88 polypeptide region lacking the TIR domain and a CD40 cytoplasmic polypeptide region lacking the CD40 extracellular domain.

18. The modified cell of claim 16, wherein the cell further comprises a third polynucleotide, wherein the third polynucleotide encodes a chimeric antigen receptor or a recombinant T cell receptor.

19-22. (canceled)

23. The modified cell of claim 16, wherein the cell is a T cell, tumor infiltrating lymphocyte, NK-T cell, or NK cell.

24. (canceled)

25. (canceled)

26. A method of stimulating an immune response in a subject, comprising:
a) transplanting modified cells of claim 16 into the subject, and
b) after (a), administering an effective amount of a rapamycin or a rapalog that binds to the FRB polypeptide or FRB variant polypeptide region of the chimeric stimulating polypeptide to stimulate a cell mediated immune response.

27. (canceled)

28. A method for treating a subject having a disease or condition associated with an elevated expression of a target antigen expressed by a target cell, comprising
a) transplanting an effective amount of modified cells into the subject; wherein the modified cells comprise a modified cell of claim 17, wherein the modified cell comprises a chimeric antigen receptor or a recombinant T cell receptor comprising an antigen recognition moiety that binds to the target antigen, and
b) after a), administering an effective amount of rapamycin or a rapalog that binds to the FRB polypeptide or FRB variant region of the chimeric stimulating polypeptide to reduce the number or concentration of target antigen or target cells in the subject.

29. A method for reducing the size of a tumor in a subject, comprising
a) administering a modified cell of claim 17 to the subject, wherein the cell comprises a chimeric antigen receptor or a recombinant T cell receptor comprising an antigen recognition moiety that binds to an antigen on the tumor; and
b) after a), administering an effective amount of rapamycin or a rapalog that binds to the FRB or FRB variant polypeptide region of the chimeric stimulating polypeptide to reduce the size of the tumor in the subject.

30. A method of controlling survival of transplanted modified cells in a subject, comprising
a) transplanting modified cells of claim 16 into the subject, and
b) after (a), administering to the subject a ligand that binds to the FKBP12 variant polypeptide region of the chimeric pro-apoptotic polypeptide in an amount effective to kill at least 90% of the modified cells that express the chimeric pro-apoptotic polypeptide.

31-38. (canceled)

The application's sequence listing, which the Patent Office published only in electronic form, follows.

SEQUENCE LISTING (2364 sequences)

SEQ ID NO: 1 - DNA, 590 bp, synthetic construct
  misc_feature 1..590: note = Description of Artificial Sequence: Synthetic polynucleotide
  source 1..590: mol_type = other DNA
tgaaagaccccacctgtaggtttggcaagctagcttaagtaacgccattttgcaaggcatggaaaaatacataactgagaatagaaaagttcagatcaaggtcaggaacagatggaacagctgaatatgggccaaacaggatatctgtggtaagcagttcctgccccggctcagggccaagaacagatggaacagctgaatatgggccaaacaggatatctgtggtaagcagttcctgccccggctcagggccaagaacagatggtccccagatgcggtccagccctcagcagtttctagagaaccatcagatgtttccagggtgccccaaggacctgaaatgaccctgtgccttatttgaactaaccaatcagttcgcttctcgcttctgttcgcgcgcttatgctccccgagctcaataaaagagcccacaacccctcactcggggcgccagtcctccgattgactgagtcgcccgggtacccgtgtatccaataaaccctcttgcagttgcatccgacttgtggtctcgctgttccttgggagggtctcctctgagtgattgactacccgtcagcgggggtctttca

SEQ ID NO: 2 - DNA, 321 bp, Homo sapiens
  source 1..321: mol_type = genomic DNA
ggagtgcaggtggaaaccatctccccaggagacgggcgcaccttccccaagcgcggccagacctgcgtggtgcactacaccgggatgcttgaagatggaaagaaagttgattcctcccgggacagaaacaagccctttaagtttatgctaggcaagcaggaggtgatccgaggctgggaagaaggggttgcccagatgagtgtgggtcagagagccaaactgactatatctccagattatgcctatggtgccactgggcacccaggcatcatcccaccacatgccactctcgtcttcgatgtggagcttctaaaactggaa

SEQ ID NO: 3 - protein, 107 aa, Homo sapiens
GVQVETISPGDGRTFPKRGQTCVVHYTGMLEDGKKVDSSRDRNKPFKFMLGKQEVIRGWEEGVAQMSVGQRAKLTISPDYAYGATGHPGIIPPHATLVFDVELLKLE

SEQ ID NO: 4 - DNA, 18 bp, synthetic construct
  misc_feature 1..18: note = Description of Artificial Sequence: Synthetic oligonucleotide
  source 1..18: mol_type = other DNA
tctggcggtggatccgga

SEQ ID NO: 5 - protein, 6 aa, synthetic construct
  REGION 1..6: note = Description of Artificial Sequence: Synthetic peptide
SGGGSG

SEQ ID NO: 6-7 - skipped (2 entries)

SEQ ID NO: 8 - DNA, 846 bp, synthetic construct
  misc_feature 1..846: note = Description of Artificial Sequence: Synthetic polynucleotide
  source 1..846: mol_type = other DNA
ggatttggtgatgtcggtgctcttgagagtttgaggggaaatgcagatttggcttacatcctgagcatggagccctgtggccactgcctcattatcaacaatgtgaacttctgccgtgagtccgggctccgcacccgcactggctccaacatcgactgtgagaagttgcggcgtcgcttctcctcgctgcatttcatggtggaggtgaagggcgacctgactgccaagaaaatggtgctggctttgctggagctggcgcagcaggaccacggtgctctggactgctgcgtggtggtcattctctctcacggctgtcaggccagccacctgcagttcccaggggctgtctacggcacagatggatgccctgtgtcggtcgagaagattgtgaacatcttcaatgggaccagctgccccagcctgggagggaagcccaagctctttttcatccaggcctgtggtggggagcagaaagaccatgggtttgaggtggcctccacttcccctgaagacgagtcccctggcagtaaccccgagccagatgccaccccgttccaggaaggtttgaggaccttcgaccagctggacgccatatctagtttgcccacacccagtgacatctttgtgtcctactctactttcccaggttttgtttcctggagggaccccaagagtggctcctggtacgttgagaccctggacgacatctttgagcagtgggctcactctgaagacctgcagtccctcctgcttagggtcgctaatgctgtttcggtgaaagggatttataaacagatgcctggttgctttaatttcctccggaaaaaacttttctttaaaacatca

SEQ ID NO: 9 - protein, 282 aa, synthetic construct
  REGION 1..282: note = Description of Artificial Sequence: Synthetic polypeptide
GFGDVGALESLRGNADLAYILSMEPCGHCLIINNVNFCRESGLRTRTGSNIDCEKLRRRFSSLHFMVEVKGDLTAKKMVLALLELAQQDHGALDCCVVVILSHGCQASHLQFPGAVYGTDGCPVSVEKIVNIFNGTSCPSLGGKPKLFFIQACGGEQKDHGFEVASTSPEDESPGSNPEPDATPFQEGLRTFDQLDAISSLPTPSDIFVSYSTFPGFVSWRDPKSGSWYVETLDDIFEQWAHSEDLQSLLLRVANAVSVKGIYKQMPGCFNFLRKKLFFKTS

SEQ ID NO: 10-11 - skipped (2 entries)

SEQ ID NO: 12 - DNA, 57 bp, Thosea asigna virus
  source 1..57: mol_type = unassigned DNA
gccgagggcaggggaagtcttctaacatgcggggacgtggaggaaaatcccgggccc

SEQ ID NO: 13 - protein, 19 aa, Thosea asigna virus
AEGRGSLLTCGDVEENPGP

SEQ ID NO: 14 - DNA, 999 bp, Homo sapiens
  source 1..999: mol_type = genomic DNA
atgccacctcctcgcctcctcttcttcctcctcttcctcacccccatggaagtcaggcccgaggaacctctagtggtgaaggtggaagagggagataacgctgtgctgcagtgcctcaaggggacctcagatggccccactcagcagctgacctggtctcgggagtccccgcttaaacccttcttaaaactcagcctggggctgccaggcctgggaatccacatgaggcccctggccatctggcttttcatcttcaacgtctctcaacagatggggggcttctacctgtgccagccggggcccccctctgagaaggcctggcagcctggctggacagtcaatgtggagggcagcggggagctgttccggtggaatgtttcggacctaggtggcctgggctgtggcctgaagaacaggtcctcagagggccccagctccccttccgggaagctcatgagccccaagctgtatgtgtgggccaaagaccgccctgagatctgggagggagagcctccgtgtctcccaccgagggacagcctgaaccagagcctcagccaggacctcaccatggcccctggctccacactctggctgtcctgtggggtaccccctgactctgtgtccaggggccccctctcctggacccatgtgcaccccaaggggcctaagtcattgctgagcctagagctgaaggacgatcgcccggccagagatatgtgggtaatggagacgggtctgttgttgccccgggccacagctcaagacgctggaaagtattattgtcaccgtggcaacctgaccatgtcattccacctggagatcactgctcggccagtactatggcactggctgctgaggactggtggctggaaggtctcagctgtgactttggcttatctgatcttctgcctgtgttcccttgtgggcattcttcatcttcaaagagccctggtcctgaggaggaaaagaaagcgaatgactgaccccaccaggagattc

SEQ ID NO: 15 - protein, 333 aa, Homo sapiens
MPPPRLLFFLLFLTPMEVRPEEPLVVKVEEGDNAVLQCLKGTSDGPTQQLTWSRESPLKPFLKLSLGLPGLGIHMRPLAIWLFIFNVSQQMGGFYLCQPGPPSEKAWQPGWTVNVEGSGELFRWNVSDLGGLGCGLKNRSSEGPSSPSGKLMSPKLYVWAKDRPEIWEGEPPCLPPRDSLNQSLSQDLTMAPGSTLWLSCGVPPDSVSRGPLSWTHVHPKGPKSLLSLELKDDRPARDMWVMETGLLLPRATAQDAGKYYCHRGNLTMSFHLEITARPVLWHWLLRTGGWKVSAVTLAYLIFCLCSLVGILHLQRALVLRRKRKRMTDPTRRF

SEQ ID NO: 16 - DNA, 590 bp, synthetic construct
  misc_feature 1..590: note = Description of Artificial Sequence: Synthetic polynucleotide
  source 1..590: mol_type = other DNA
tgaaagaccccacctgtaggtttggcaagctagcttaagtaacgccattttgcaaggcatggaaaaatacataactgagaatagagaagttcagatcaaggtcaggaacagatggaacagctgaatatgggccaaacaggatatctgtggtaagcagttcctgccccggctcagggccaagaacagatggaacagctgaatatgggccaaacaggatatctgtggtaagcagttcctgccccggctcagggccaagaacagatggtccccagatgcggtccagccctcagcagtttctagagaaccatcagatgtttccagggtgccccaaggacctgaaatgaccctgtgccttatttgaactaaccaatcagttcgcttctcgcttctgttcgcgcgcttctgctccccgagctcaataaaagagcccacaacccctcactcggggcgccagtcctccgattgactgagtcgcccgggtacccgtgtatccaataaaccctcttgcagttgcatccgacttgtggtctcgctgttccttgggagggtctcctctgagtgattgactacccgtcagcgggggtctttca

SEQ ID NO: 17 - DNA, 8622 bp, synthetic construct
  misc_feature 1..8622: note = Description of Artificial Sequence: Synthetic polynucleotide
  source 1..8622: mol_type = other DNA
tgaaagaccccacctgtaggtttggcaagctagcttaagtaacgccattttgcaaggcatggaaaaatacataactgagaatagaaaagttcagatcaaggtcaggaacagatggaacagctgaatatgggccaaacaggatatctgtggtaagcagttcctgccccggctcagggccaagaacagatggaacagctgaatatgggccaaacaggatatctgtggtaagcagttcctgccccggctcagggccaagaacagatggtccccagatgcggtccagccctcagcagtttctagagaaccatcagatgtttccagggtgccccaaggacctgaaatgaccctgtgccttatttgaactaaccaatcagttcgcttctcgcttctgttcgcgcgcttatgctccccgagctcaataaaagagcccacaacccctcactcggggcgccagtcctccgattgactgagtcgcccgggtacccgtgtatccaataaaccctcttgcagttgcatccgacttgtggtctcgctgttccttgggagggtctcctctgagtgattgactacccgtcagcgggggtctttcatttgggggctcgtccgggatcgggagacccctgcccagggaccaccgacccaccaccgggaggtaagctggccagcaacttatctgtgtctgtccgattgtctagtgtctatgactgattttatgcgcctgcgtcggtactagttagctaactagctctgtatctggcggacccgtggtggaactgacgagttcggaacacccggccgcaaccctgggagacgtcccagggacttcgggggccgtttttgtggcccgacctgagtcctaaaatcccgatcgtttaggactctttggtgcaccccccttagaggagggatatgtggttctggtaggagacgagaacctaaaacagttcccgcctccgtctgaatttttgctttcggtttgggaccgaagccgcgccgcgcgtcttgtctgctgcagcatcgttctgtgttgtctctgtctgactgtgtttctgtatttgtctgaaaatatgggcccgggctagcctgttaccactcccttaagtttgaccttaggtcactggaaagatgtcgagcggatcgctcacaaccagtcggtagatgtcaagaagagacgttgggttaccttctgctctgcagaatggccaacctttaacgtcggatggccgcgagacggcacctttaaccgagacctcatcacccaggttaagatcaaggtcttttcacctggcccgcatggacacccagaccaggtggggtacatcgtgacctgggaagccttggcttttgacccccctccctgggtcaagccctttgtacaccctaagcctccgcctcctcttcctccatccgccccgtctctcccccttgaacctcctcgttcgaccccgcctcgatcctccctttatccagccctcactccttctctaggcgcccccatatggccatatgagatcttatatggggcacccccgccccttgtaaacttccctgaccctgacatgacaagagttactaacagcccctctctccaagctcacttacaggctctctacttagtccagcacgaagtctggagacctctggcggcagcctaccaagaacaactggaccgaccggtggtacctcacccttaccgagtcggcgacacagtgtgggtccgccgacaccagactaagaacctagaacctcgctggaaaggaccttacacagtcctgctgaccacccccaccgccctcaaagtagacggcatcgcagcttggatacacgccgcccacgtgaaggctgccgaccccgggggtggaccatcctctagactgccatgctcgagggagtgcaggtggaaaccatctccccaggagacgggcgcaccttccccaagcgcggccagacctgcgtggtgcactacaccgggatgcttgaagatggaaagaaagttgattcctcccgggacagaaacaagccctttaagtttatgctaggcaagcaggaggtgatccgaggctgggaagaaggggttgcccagatgagtgtgggtcagagagccaaactgactatatctccagattatgcctatggtgccactgggcacccaggcatcatcccaccacatgccactctcgtcttcgatgtggagcttctaaaactggaatctggcggtggatccggagtcgacggatttggtgatgtcggtgctcttgagagtttgaggggaaatgcagatttggcttacatcctgagcatggagccctgtggccactgcctcattatcaacaatgtgaacttctgccgtgagtccgggctccgcacccgcactggctccaacatcgactgtgagaagttgcggcgtcgcttctcctcgctgcatttcatggtggaggtgaagggcgacctgactgccaagaaaatggtgctggctttgctggagctggcgcagcaggaccacggtgctctggactgctgcgtggtggtcattctctctcacggctgtcaggccagccacctgcagttcccaggggctgtctacggcacagatggatgccctgtgtcggtcgagaagattgtgaacatcttcaatgggaccagctgccccagcctgggagggaagcccaagctctttttcatccaggcctgtggtggggagcagaaagaccatgggtttgaggtggcctccacttcccctgaagacgagtcccctggcagtaaccccgagccagatgccaccccgttccaggaaggtttgaggaccttcgaccagctggacgccatatctagtttgcccacacccagtgacatctttgtgtcctactctactttcccaggttttgtttcctggagggaccccaagagtggctcctggtacgttgagaccctggacgacatctttgagcagtgggctcactctgaagacctgcagtccctcctgcttagggtcgctaatgctgtttcggtgaaagggatttataaacagatgcctggttgctttaatttcctccggaaaaaacttttctttaaaacatcagctagcagagccgagggcaggggaagtcttctaacatgcggggacgtggaggaaaatcccgggcccatgccacctcctcgcctcctcttcttcctcctcttcctcacccccatggaagtcaggcccgaggaacctctagtggtgaaggtggaagagggagataacgctgtgctgcagtgcctcaaggggacctcagatggccccactcagcagctgacctggtctcgggagtccccgcttaaacccttcttaaaactcagcctggggctgccaggcctgggaatccacatgaggcccctggccatctggcttttcatcttcaacgtctctcaacagatggggggcttctacctgtgccagccggggcccccctctgagaaggcctggcagcctggctggacagtcaatgtggagggcagcggggagctgttccggtggaatgtttcggacctaggtggcctgggctgtggcctgaagaacaggtcctcagagggccccagctccccttccgggaagctcatgagccccaagctgtatgtgtgggccaaagaccgccctgagatctgggagggagagcctccgtgtctcccaccgagggacagcctgaaccagagcctcagccaggacctcaccatggcccctggctccacactctggctgtcctgtggggtaccccctgactctgtgtccaggggccccctctcctggacccatgtgcaccccaaggggcctaagtcattgctgagcctagagctgaaggacgatcgcccggccagagatatgtgggtaatggagacgggtctgttgttgccccgggccacagctcaagacgctggaaagtattattgtcaccgtggcaacctgaccatgtcattccacctggagatcactgctcggccagtactatggcactggctgctgaggactggtggctggaaggtctcagctgtgactttggcttatctgatcttctgcctgtgttcccttgtgggcattcttcatcttcaaagagccctggtcctgaggaggaaaagaaagcgaatgactgaccccaccaggagattctaacgcgtcatcatcgatccggattagtccaatttgttaaagacaggatatcagtggtccaggctctagttttgactcaacaatatcaccagctgaagcctatagagtacgagccatagataaaataaaagattttatttagtctccagaaaaaggggggaatgaaagaccccacctgtaggtttggcaagctagcttaagtaacgccattttgcaaggcatggaaaaatacataactgagaatagagaagttcagatcaaggtcaggaacagatggaacagctgaatatgggccaaacaggatatctgtggtaagcagttcctgccccggctcagggccaagaacagatggaacagctgaatatgggccaaacaggatatctgtggtaagcagttcctgccccggctcagggccaagaacagatggtccccagatgcggtccagccctcagcagtttctagagaaccatcagatgtttccagggtgccccaaggacctgaaatgaccctgtgccttatttgaactaaccaatcagttcgcttctcgcttctgttcgcgcgcttctgctccccgagctcaataaaagagcccacaacccctcactcggggcgccagtcctccgattgactgagtcgcccgggtacccgtgtatccaataaaccctcttgcagttgcatccgacttgtggtctcgctgttccttgggagggtctcctctgagtgattgactacccgtcagcgggggtctttcacacatgcagcatgtatcaaaattaatttggttttttttcttaagtatttacattaaatggccatagtacttaaagttacattggcttccttgaaataaacatggagtattcagaatgtgtcataaatatttctaattttaagatagtatctccattggctttctactttttcttttatttttttttgtcctctgtcttccatttgttgttgttgttgtttgtttgtttgtttgttggttggttggttaatttttttttaaagatcctacactatagttcaagctagactattagctactctgtaacccagggtgaccttgaagtcatgggtagcctgctgttttagccttcccacatctaagattacaggtatgagctatcatttttggtatattgattgattgattgattgatgtgtgtgtgtgtgattgtgtttgtgtgtgtgactgtgaaaatgtgtgtatgggtgtgtgtgaatgtgtgtatgtatgtgtgtgtgtgagtgtgtgtgtgtgtgtgtgcatgtgtgtgtgtgtgactgtgtctatgtgtatgactgtgtgtgtgtgtgtgtgtgtgtgtgtgtgtgtgtgtgtgtgtgtgttgtgaaaaaatattctatggtagtgagagccaacgctccggctcaggtgtcaggttggtttttgagacagagtctttcacttagcttggaattcactggccgtcgttttacaacgtcgtgactgggaaaaccctggcgttacccaacttaatcgccttgcagcacatccccctttcgccagctggcgtaatagcgaagaggcccgcaccgatcgcccttcccaacagttgcgcagcctgaatggcgaatggcgcctgatgcggtattttctccttacgcatctgtgcggtatttcacaccgcatatggtgcactctcagtacaatctgctctgatgccgcatagttaagccagccccgacacccgccaacacccgctgacgcgccctgacgggcttgtctgctcccggcatccgcttacagacaagctgtgaccgtctccgggagctgcatgtgtcagaggttttcaccgtcatcaccgaaacgcgcgatgacgaaagggcctcgtgatacgcctatttttataggttaatgtcatgataataatggtttcttagacgtcaggtggcacttttcggggaaatgtgcgcggaacccctatttgtttatttttctaaatacattcaaatatgtatccgctcatgagacaataaccctgataaatgcttcaataatattgaaaaaggaagagtatgagtattcaacatttccgtgtcgcccttattcccttttttgcggcattttgccttcctgtttttgctcacccagaaacgctggtgaaagtaaaagatgctgaagatcagttgggtgcacgagtgggttacatcgaactggatctcaacagcggtaagatccttgagagttttcgccccgaagaacgttttccaatgatgagcacttttaaagttctgctatgtggcgcggtattatcccgtattgacgccgggcaagagcaactcggtcgccgcatacactattctcagaatgacttggttgagtactcaccagtcacagaaaagcatcttacggatggcatgacagtaagagaattatgcagtgctgccataaccatgagtgataacactgcggccaacttacttctgacaacgatcggaggaccgaaggagctaaccgcttttttgcacaacatgggggatcatgtaactcgccttgatcgttgggaaccggagctgaatgaagccataccaaacgacgagcgtgacaccacgatgcctgtagcaatggcaacaacgttgcgcaaactattaactggcgaactacttactctagcttcccggcaacaattaatagactggatggaggcggataaagttgcaggaccacttctgcgctcggcccttccggctggctggtttattgctgataaatctggagccggtgagcgtgggtctcgcggtatcattgcagcactggggccagatggtaagccctcccgtatcgtagttatctacacgacggggagtcaggcaactatggatgaacgaaatagacagatcgctgagataggtgcctcactgattaagcattggtaactgtcagaccaagtttactcatatatactttagattgatttaaaacttcatttttaatttaaaaggatctaggtgaagatcctttttgataatctcatgaccaaaatcccttaacgtgagttttcgttccactgagcgtcagaccccgtagaaaagatcaaaggatcttcttgagatcctttttttctgcgcgtaatctgctgcttgcaaacaaaaaaaccaccgctaccagcggtggtttgtttgccggatcaagagctaccaactctttttccgaaggtaactggcttcagcagagcgcagataccaaatactgtccttctagtgtagccgtagttaggccaccacttcaagaactctgtagcaccgcctacatacctcgctctgctaatcctgttaccagtggctgctgccagtggcgataagtcgtgtcttaccgggttggactcaagacgatagttaccggataaggcgcagcggtcgggctgaacggggggttcgtgcacacagcccagcttggagcgaacgacctacaccgaactgagatacctacagcgtgagcattgagaaagcgccacgcttcccgaagggagaaaggcggacaggtatccggtaagcggcagggtcggaacaggagagcgcacgagggagcttccagggggaaacgcctggtatctttatagtcctgtcgggtttcgccacctctgacttgagcgtcgatttttgtgatgctcgtcaggggggcggagcctatggaaaaacgccagcaacgcggcctttttacggttcctggccttttgctggccttttgctcacatgttctttcctgcgttatcccctgattctgtggataaccgtattaccgcctttgagtgagctgataccgctcgccgcagccgaacgaccgagcgcagcgagtcagtgagcgaggaagcggaagagcgcccaatacgcaaaccgcctctccccgcgcgttggccgattcattaatgcagctggcacgacaggtttcccgactggaaagcgggcagtgagcgcaacgcaattaatgtgagttagctcactcattaggcaccccaggctttacactttatgcttccggctcgtatgttgtgtggaattgtgagcggataacaatttcacacaggaaacagctatgaccatgattacgccaagctttgctcttaggagtttcctaatacatcccaaactcaaatatataaagcatttgacttgttctatgccctagggggcggggggaagctaagccagctttttttaacatttaaaatgttaattccattttaaatgcacagatgtttttatttcataagggtttcaatgtgcatgaatgctgcaatattcctgttaccaaagctagtataaataaaaatagataaacgtggaaattacttagagtttctgtcattaacgtttccttcctcagttgacaacataaatgcgctgctgagcaagccagtttgcatctgtcaggatcaatttcccattatgccagtcatattaattactagtcaattagttgatttttatttttgacatatacatgtgaa

SEQ ID NO: 18 - DNA, 678 bp, synthetic construct
  misc_feature 1..678: note = Description of Artificial Sequence: Synthetic polynucleotide
  source 1..678: mol_type = other DNA
ctcgagggcgtccaagtcgaaaccattagtcccggcgatggcagaacatttcctaaaaggggacaaacatgtgtcgtccattatacaggcatgttggaggacggcaaaaaggtggacagtagtagagatcgcaataaacctttcaaattcatgttgggaaaacaagaagtcattaggggatgggaggagggcgtggctcaaatgtccgtcggccaacgcgctaagctcaccatcagccccgactacgcatacggcgctaccggacatcccggaattattccccctcacgctaccttggtgtttgacgtcgaactgttgaagctcgaagtcgagggagtgcaggtggaaaccatctccccaggagacgggcgcaccttccccaagcgcggccagacctgcgtggtgcactacaccgggatgcttgaagatggaaagaaagttgattcctcccgggacagaaacaagccctttaagtttatgctaggcaagcaggaggtgatccgaggctgggaagaaggggttgcccagatgagtgtgggtcagagagccaaactgactatatctccagattatgcctatggtgccactgggcacccaggcatcatcccaccacatgccactctcgtcttcgatgtggagcttctaaaactggaatctggcggtggatccggagtcgag

SEQ ID NO: 19 - protein, 222 aa, synthetic construct
  REGION 1..222: note = Description of Artificial Sequence: Synthetic polypeptide
GVQVETISPGDGRTFPKRGQTCVVHYTGMLEDGKKVDSSRDRNKPFKFMLGKQEVIRGWEEGVAQMSVGQRAKLTISPDYAYGATGHPGIIPPHATLVFDVELLKLEVEGVQVETISPGDGRTFPKRGQTCVVHYTGMLEDGKKVDSSRDRNKPFKFMLGKQEVIRGWEEGVAQMSVGQRAKLTISPDYAYGATGHPGIIPPHATLVFDVELLKLESGGGSG

SEQ ID NO: 20 - DNA, 1200 bp, synthetic construct
  misc_feature 1..1200: note = Description of Artificial Sequence: Synthetic polynucleotide
  source 1..1200: mol_type = other DNA
atgctcgagggagtgcaggtggagactatctccccaggagacgggcgcaccttccccaagcgcggccagacctgcgtggtgcactacaccgggatgcttgaagatggaaagaaagttgattcctcccgggacagaaacaagccctttaagtttatgctaggcaagcaggaggtgatccgaggctgggaagaaggggttgcccagatgagtgtgggtcagagagccaaactgactatatctccagattatgcctatggtgccactgggcacccaggcatcatcccaccacatgccactctcgtcttcgatgtggagcttctaaaactggaatctggcggtggatccggagtcgacggatttggtgatgtcggtgctcttgagagtttgaggggaaatgcagatttggcttacatcctgagcatggagccctgtggccactgcctcattatcaacaatgtgaacttctgccgtgagtccgggctccgcacccgcactggctccaacatcgactgtgagaagttgcggcgtcgcttctcctcgctgcatttcatggtggaggtgaagggcgacctgactgccaagaaaatggtgctggctttgctggagctggcgcggcaggaccacggtgctctggactgctgcgtggtggtcattctctctcacggctgtcaggccagccacctgcagttcccaggggctgtctacggcacagatggatgccctgtgtcggtcgagaagattgtgaacatcttcaatgggaccagctgccccagcctgggagggaagcccaagctctttttcatccaggcctgtggtggggagcagaaagaccatgggtttgaggtggcctccacttcccctgaagacgagtcccctggcagtaaccccgagccagatgccaccccgttccaggaaggtttgaggaccttcgaccagctggacgccatatctagtttgcccacacccagtgacatctttgtgtcctactctactttcccaggttttgtttcctggagggaccccaagagtggctcctggtacgttgagaccctggacgacatctttgagcagtgggctcactctgaagacctgcagtccctcctgcttagggtcgctaatgctgtttcggtgaaagggatttataaacagatgcctggttgctttaatttcctccggaaaaaacttttctttaaaacatca

SEQ ID NO: 21 - protein, 107 aa, synthetic construct; identical to SEQ ID NO: 3
  REGION 1..107: note = Description of Artificial Sequence: Synthetic polypeptide

SEQ ID NO: 22 - protein, 282 aa, synthetic construct
  REGION 1..282: note = Description of Artificial Sequence: Synthetic polypeptide
GFGDVGALESLRGNADLAYILSMEPCGHCLIINNVNFCRESGLRTRTGSNIDCEKLRRRFSSLHFMVEVKGDLTAKKMVLALLELARQDHGALDCCVVVILSHGCQASHLQFPGAVYGTDGCPVSVEKIVNIFNGTSCPSLGGKPKLFFIQACGGEQKDHGFEVASTSPEDESPGSNPEPDATPFQEGLRTFDQLDAISSLPTPSDIFVSYSTFPGFVSWRDPKSGSWYVETLDDIFEQWAHSEDLQSLLLRVANAVSVKGIYKQMPGCFNFLRKKLFFKTS

SEQ ID NO: 23 - DNA, 846 bp, synthetic construct
  misc_feature 1..846: note = Description of Artificial Sequence: Synthetic polynucleotide
  source 1..846: mol_type = other DNA
ggatttggtgatgtcggtgctcttgagagtttgaggggaaatgcagatttggcttacatcctgagcatggagccctgtggccactgcctcattatcaacaatgtgaacttctgccgtgagtccgggctccgcacccgcactggctccaacatcgactgtgagaagttgcggcgtcgcttctcctcgctgcatttcatggtggaggtgaagggcgacctgactgccaagaaaatggtgctggctttgctggagctggcgcggcaggaccacggtgctctggactgctgcgtggtggtcattctctctcacggctgtcaggccagccacctgcagttcccaggggctgtctacggcacagatggatgccctgtgtcggtcgagaagattgtgaacatcttcaatgggaccagctgccccagcctgggagggaagcccaagctctttttcatccaggcctgtggtggggagcagaaagaccatgggtttgaggtggcctccacttcccctgaagacgagtcccctggcagtaaccccgagccagatgccaccccgttccaggaaggtttgaggaccttcgaccagctggccgccatatctagtttgcccacacccagtgacatctttgtgtcctactctactttcccaggttttgtttcctggagggaccccaagagtggctcctggtacgttgagaccctggacgacatctttgagcagtgggctcactctgaagacctgcagtccctcctgcttagggtcgctaatgctgtttcggtgaaagggatttataaacagatgcctggttgctttaatttcctccggaaaaaacttttctttaaaacatca

SEQ ID NO: 24 - protein, 282 aa, synthetic construct
  REGION 1..282: note = Description of Artificial Sequence: Synthetic polypeptide
GFGDVGALESLRGNADLAYILSMEPCGHCLIINNVNFCRESGLRTRTGSNIDCEKLRRRFSSLHFMVEVKGDLTAKKMVLALLELARQDHGALDCCVVVILSHGCQASHLQFPGAVYGTDGCPVSVEKIVNIFNGTSCPSLGGKPKLFFIQACGGEQKDHGFEVASTSPEDESPGSNPEPDATPFQEGLRTFDQLAAISSLPTPSDIFVSYSTFPGFVSWRDPKSGSWYVETLDDIFEQWAHSEDLQSLLLRVANAVSVKGIYKQMPGCFNFLRKKLFFKTS

SEQ ID NO: 25 - DNA, 846 bp, synthetic construct
  misc_feature 1..846: note = Description of Artificial Sequence: Synthetic polynucleotide
  source 1..846: mol_type = other DNA
ggatttggtgatgtcggtgctcttgagagtttgaggggaaatgcagatttggcttacatcctgagcatggagccctgtggccactgcctcattatcaacaatgtgaacttctgccgtgagtccgggctccgcacccgcactggctccaacatcgactgtgagaagttgcggcgtcgcttctcctcgctgcatttcatggtggaggtgaagggcgacctgactgccaagaaaatggtgctggctttgctggagctggcgcggcaggaccacggtgctctggactgctgcgtggtggtcattctctctcacggctgtcaggccagccacctgcagttcccaggggctgtctacggcacagatggatgccctgtgtcggtcgagaagattgtgaacatcttcaatgggaccagctgccccagcctgggagggaagcccaagctctttttcatccaggcctgtggtggggagcagaaagaccatgggtttgaggtggcctccacttcccctgaagacgagtcccctggcagtaaccccgagccagatgccaccccgttccaggaaggtttgaggaccttcgaccagctggacgccatatctagtttgcccacacccagtgacatctttgtgtcctactctactttcccaggttttgtttcctggagggaccccaagagtggctcctggtacgttgagaccctggacgacatctttgagcagtgggctcactctgaagacctgcagtccctcctgcttagggtcgctaatgctgtttcggtgaaagggatttataaacagatgcctggttgctttcagttcctccggaaaaaacttttctttaaaacatca

SEQ ID NO: 26 - protein, 282 aa, synthetic construct
  REGION 1..282: note = Description of Artificial Sequence: Synthetic polypeptide
GFGDVGALESLRGNADLAYILSMEPCGHCLIINNVNFCRESGLRTRTGSNIDCEKLRRRFSSLHFMVEVKGDLTAKKMVLALLELARQDHGALDCCVVVILSHGCQASHLQFPGAVYGTDGCPVSVEKIVNIFNGTSCPSLGGKPKLFFIQACGGEQKDHGFEVASTSPEDESPGSNPEPDATPFQEGLRTFDQLDAISSLPTPSDIFVSYSTFPGFVSWRDPKSGSWYVETLDDIFEQWAHSEDLQSLLLRVANAVSVKGIYKQMPGCFQFLRKKLFFKTS

SEQ ID NO: 27 - DNA, 846 bp, synthetic construct
  misc_feature 1..846: note = Description of Artificial Sequence: Synthetic polynucleotide
  source 1..846: mol_type = other DNA
ggatttggtgatgtcggtgctcttgagagtttgaggggaaatgcagatttggcttacatcctgagcatggagccctgtggccactgcctcattatcaacaatgtgaacttctgccgtgagtccgggctccgcacccgcactggctccaacatcgactgtgagaagttgcggcgtcgcttctcctcgctgcatttcatggtggaggtgaagggcgacctgactgccaagaaaatggtgctggctttgctggagctggcgcggcaggaccacggtgctctggactgctgcgtggtggtcattctctctcacggctgtcaggccagccacctgcagttcccaggggctgtctacggcacagatggatgccctgtgtcggtcgagaagattgtgaacatcttcaatgggaccagctgccccagcctgggagggaagcccaagctctttttcatccaggcctgtggtggggagcagaaagaccatgggtttgaggtggcctccacttcccctgaagacgagtcccctggcagtaaccccgagccagatgccaccccgttccaggaaggtttgaggaccttcgaccagctggccgccatatctagtttgcccacacccagtgacatctttgtgtcctactctactttcccaggttttgtttcctggagggaccccaagagtggctcctggtacgttgagaccctggacgacatctttgagcagtgggctcactctgaagacctgcagtccctcctgcttagggtcgctaatgctgtttcggtgaaagggatttataaacagatgcctggttgctttcagttcctccggaaaaaacttttctttaaaacatca

SEQ ID NO: 28 - protein, 282 aa, synthetic construct
  REGION 1..282: note = Description of Artificial Sequence: Synthetic polypeptide
GFGDVGALESLRGNADLAYILSMEPCGHCLIINNVNFCRESGLRTRTGSNIDCEKLRRRFSSLHFMVEVKGDLTAKKMVLALLELARQDHGALDCCVVVILSHGCQASHLQFPGAVYGTDGCPVSVEKIVNIFNGTSCPSLGGKPKLFFIQACGGEQKDHGFEVASTSPEDESPGSNPEPDATPFQEGLRTFDQLAAISSLPTPSDIFVSYSTFPGFVSWRDPKSGSWYVETLDDIFEQWAHSEDLQSLLLRVANAVSVKGIYKQMPGCFQFLRKKLFFKTS

SEQ ID NO: 29 - DNA, 321 bp, synthetic construct
  misc_feature 1..321: note = Description of Artificial Sequence: Synthetic polynucleotide
  source 1..321: mol_type = other DNA
ggcgttcaagtagaaacaatcagcccaggagacggaaggactttccccaaacgaggccaaacatgcgtagttcattatactgggatgctcgaagatggaaaaaaagtagatagtagtagagaccgaaacaaaccatttaaatttatgttgggaaaacaagaagtaataaggggctgggaagaaggtgtagcacaaatgtctgttggccagcgcgcaaaactcacaatttctcctgattatgcttacggagctaccggccaccccggcatcataccccctcatgccacactggtgtttgacgtcgaattgctcaaactggaa

SEQ ID NO: 30 - protein, 107 aa, synthetic construct; identical to SEQ ID NO: 3
  REGION 1..107: note = Description of Artificial Sequence: Synthetic polypeptide

SEQ ID NO: 31 - DNA, 321 bp, synthetic construct
  misc_feature 1..321: note = Description of Artificial Sequence: Synthetic polynucleotide
  source 1..321: mol_type = other DNA
ggagtgcaggtggagacgattagtcctggggatgggagaacctttccaaagcgcggtcagacctgtgttgtccactacaccggtatgctggaggacgggaagaaggtggactcttcacgcgatcgcaataagcctttcaagttcatgctcggcaagcaggaggtgatccgggggtgggaggagggcgtggctcagatgtcggtcgggcaacgagcgaagcttaccatctcacccgactacgcgtatggggcaacggggcatccgggaattatccctccccacgctacgctcgtattcgatgtggagctcttgaagcttgag

SEQ ID NO: 32 - protein, 107 aa, synthetic construct; identical to SEQ ID NO: 3
  REGION 1..107: note = Description of Artificial Sequence: Synthetic polypeptide

SEQ ID NO: 33 - DNA, 1002 bp, synthetic construct
  misc_feature 1..1002: note = Description of Artificial Sequence: Synthetic polynucleotide
  source 1..1002: mol_type = other DNA
atgccccctcctagactgctgtttttcctgctctttctcaccccaatggaagttagacctgaggaaccactggtcgttaaagtggaagaaggtgataatgctgtcctccaatgccttaaagggaccagcgacggaccaacgcagcaactgacttggagccgggagtcccctctcaagccgtttctcaagctgtcacttggcctgccaggtcttggtattcacatgcgcccccttgccatttggctcttcatattcaatgtgtctcaacaaatgggtggattctacctttgccagcccggccccccttctgagaaagcttggcagcctggatggaccgtcaatgttgaaggctccggtgagctgtttagatggaatgtgagcgaccttggcggactcggttgcggactgaaaaataggagctctgaaggaccctcttctccctccggtaagttgatgtcacctaagctgtacgtgtgggccaaggaccgccccgaaatctgggagggcgagcctccatgcctgccgcctcgcgattcactgaaccagtctctgtcccaggatctcactatggcgcccggatctactctttggctgtcttgcggcgttcccccagatagcgtgtcaagaggacctctgagctggacccacgtacaccctaagggccctaagagcttgttgagcctggaactgaaggacgacagacccgcacgcgatatgtgggtaatggagaccggccttctgctccctcgcgctaccgcacaggatgcagggaaatactactgtcatagagggaatctgactatgagctttcatctcgaaattacagcacggcccgttctttggcattggctcctccggactggaggctggaaggtgtctgccgtaacactcgcttacttgattttttgcctgtgtagcctggttgggatcctgcatcttcagcgagcccttgtattgcgccgaaaaagaaaacgaatgactgaccctacacgacgattctga

SEQ ID NO: 34 - protein, 333 aa, synthetic construct; identical to SEQ ID NO: 15
  REGION 1..333: note = Description of Artificial Sequence: Synthetic polypeptide

SEQ ID NO: 35 - DNA, 330 bp, synthetic construct
  misc_feature 1..330: note = Description of Artificial Sequence: Synthetic polynucleotide
  source 1..330: mol_type = other DNA
atgctggagggagtgcaggtggagactattagccccggagatggcagaacattccccaaaagaggacagacttgcgtcgtgcattatactggaatgctggaagacggcaagaaggtggacagcagccgggaccgaaacaagcccttcaagttcatgctggggaagcaggaagtgatccggggctgggaggaaggagtcgcacagatgtcagtgggacagagggccaaactgactattagcccagactacgcttatggagcaaccggccaccccgggatcattccccctcatgctacactggtcttcgatgtggagctgctgaagctggaa

SEQ ID NO: 36 - protein, 110 aa, synthetic construct
  REGION 1..110: note = Description of Artificial Sequence: Synthetic polypeptide
MLEGVQVETISPGDGRTFPKRGQTCVVHYTGMLEDGKKVDSSRDRNKPFKFMLGKQEVIRGWEEGVAQMSVGQRAKLTISPDYAYGATGHPGIIPPHATLVFDVELLKLE

SEQ ID NO: 37 - DNA, 18 bp, synthetic construct
  misc_feature 1..18: note = Description of Artificial Sequence: Synthetic oligonucleotide
  source 1..18: mol_type = other DNA
agcggaggaggatccgga

SEQ ID NO: 38 - protein, 6 aa, synthetic construct
  REGION 1..6: note = Description of Artificial Sequence: Synthetic peptide
SGGGSG

SEQ ID NO: 39 - DNA, 864 bp, synthetic construct
  misc_feature 1..864: note = Description of Artificial Sequence: Synthetic polynucleotide
  source 1..864: mol_type = other DNA
gtggacgggtttggagatgtgggagccctggaatccctgcggggcaatgccgatctggcttacatcctgtctatggagccttgcggccactgtctgatcattaacaatgtgaacttctgcagagagagcgggctgcggaccagaacaggatccaatattgactgtgaaaagctgcggagaaggttctctagtctgcactttatggtcgaggtgaaaggcgatctgaccgctaagaaaatggtgctggccctgctggaactggctcggcaggaccatggggcactggattgctgcgtggtcgtgatcctgagtcacggctgccaggcttcacatctgcagttccctggggcagtctatggaactgacggctgtccagtcagcgtggagaagatcgtgaacatcttcaacggcacctcttgcccaagtctgggcgggaagcccaaactgttctttattcaggcctgtggaggcgagcagaaagatcacggcttcgaagtggctagcacctcccccgaggacgaatcacctggaagcaaccctgagccagatgcaacccccttccaggaaggcctgaggacatttgaccagctggatgccatctcaagcctgcccacaccttctgacattttcgtctcttacagtactttccctggatttgtgagctggcgcgatccaaagtcaggcagctggtacgtggagacactggacgatatctttgagcagtgggcccattctgaagacctgcagagtctgctgctgcgagtggccaatgctgtctctgtgaaggggatctacaaacagatgccaggatgcttccagtttctgagaaagaaactgttctttaagacctccgcatctagggcc

SEQ ID NO: 40 - protein, 288 aa, synthetic construct
  REGION 1..288: note = Description of Artificial Sequence: Synthetic polypeptide
VDGFGDVGALESLRGNADLAYILSMEPCGHCLIINNVNFCRESGLRTRTGSNIDCEKLRRRFSSLHFMVEVKGDLTAKKMVLALLELARQDHGALDCCVVVILSHGCQASHLQFPGAVYGTDGCPVSVEKIVNIFNGTSCPSLGGKPKLFFIQACGGEQKDHGFEVASTSPEDESPGSNPEPDATPFQEGLRTFDQLDAISSLPTPSDIFVSYSTFPGFVSWRDPKSGSWYVETLDDIFEQWAHSEDLQSLLLRVANAVSVKGIYKQMPGCFQFLRKKLFFKTSASRA

SEQ ID NO: 41-42 - skipped (2 entries)

SEQ ID NO: 43 - protein, 18 aa, synthetic construct
  REGION 1..18: note = Description of Artificial Sequence: Synthetic peptide
EGRGSLLTCGDVEENPGP

SEQ ID NO: 44 - DNA, 864 bp, synthetic construct
  misc_feature 1..864: note = Description of Artificial Sequence: Synthetic polynucleotide
  source 1..864: mol_type = other DNA
gtcgacggatttggtgatgtcggtgctcttgagagtttgaggggaaatgcagatttggcttacatcctgagcatggagccctgtggccactgcctcattatcaacaatgtgaacttctgccgtgagtccgggctccgcacccgcactggctccaacatcgactgtgagaagttgcggcgtcgcttctcctcgctgcatttcatggtggaggtgaagggcgacctgactgccaagaaaatggtgctggctttgctggagctggcgcggcaggaccacggtgctctggactgctgcgtggtggtcattctctctcacggctgtcaggccagccacctgcagttcccaggggctgtctacggcacagatggatgccctgtgtcggtcgagaagattgtgaacatcttcaatgggaccagctgccccagcctgggagggaagcccaagctctttttcatccaggcctgtggtggggagcagaaagaccatgggtttgaggtggcctccacttcccctgaagacgagtcccctggcagtaaccccgagccagatgccaccccgttccaggaaggtttgaggaccttcgaccagctggacgccatatctagtttgcccacacccagtgacatctttgtgtcctactctactttcccaggttttgtttcctggagggaccccaagagtggctcctggtacgttgagaccctggacgacatctttgagcagtgggctcactctgaagacctgcagtccctcctgcttagggtcgctaatgctgtttcggtgaaagggatttataaacagatgcctggttgctttaatttcctccggaaaaaacttttctttaaaacatcagctagcagagcc

SEQ ID NO: 45 - protein, 288 aa, synthetic construct
  REGION 1..288: note = Description of Artificial Sequence: Synthetic polypeptide
VDGFGDVGALESLRGNADLAYILSMEPCGHCLIINNVNFCRESGLRTRTGSNIDCEKLRRRFSSLHFMVEVKGDLTAKKMVLALLELARQDHGALDCCVVVILSHGCQASHLQFPGAVYGTDGCPVSVEKIVNIFNGTSCPSLGGKPKLFFIQACGGEQKDHGFEVASTSPEDESPGSNPEPDATPFQEGLRTFDQLDAISSLPTPSDIFVSYSTFPGFVSWRDPKSGSWYVETLDDIFEQWAHSEDLQSLLLRVANAVSVKGIYKQMPGCFNFLRKKLFFKTSASRA

SEQ ID NO: 46 - DNA, 864 bp, synthetic construct
  misc_feature 1..864: note = Description of Artificial Sequence: Synthetic polynucleotide
  source 1..864: mol_type = other DNA
gtggacgggtttggagatgtgggagccctggaatccctgcggggcaatgccgatctggcttacatcctgtctatggagccttgcggccactgtctgatcattaacaatgtgaacttctgcagagagagcgggctgcggaccagaacaggatccaatattgactgtgaaaagctgcggagaaggttctctagtctgcactttatggtcgaggtgaaaggcgatctgaccgctaagaaaatggtgctggccctgctggaactggctcggcaggaccatggggcactggattgctgcgtggtcgtgatcctgagtcacggctgccaggcttcacatctgcagttccctggggcagtctatggaactgacggctgtccagtcagcgtggagaagatcgtgaacatcttcaacggcacctcttgcccaagtctgggcgggaagcccaaactgttctttattcaggcctgtggaggcgagcagaaagatcacggcttcgaagtggctagcacctcccccgaggacgaatcacctggaagcaaccctgagccagatgcaacccccttccaggaaggcctgaggacatttgaccagctggatgccatctcaagcctgcccacaccttctgacattttcgtctcttacagtactttccctggatttgtgagctggcgcgatccaaagtcaggcagctggtacgtggagacactggacgatatctttgagcagtgggcccattctgaagacctgcagagtctgctgctgcgagtggccaatgctgtctctgtgaaggggatctacaaacagatgccaggatgcttcaactttctgagaaagaaactgttctttaagacctccgcatctagggcc

SEQ ID NO: 47 - protein, 288 aa, synthetic construct; identical to SEQ ID NO: 45
  REGION 1..288: note = Description of Artificial Sequence: Synthetic polypeptide

SEQ ID NO: 48 - DNA, 864 bp, synthetic construct
  misc_feature 1..864: note = Description of Artificial Sequence: Synthetic polynucleotide
  source 1..864: mol_type = other DNA
gtcgacggatttggtgatgtcggtgctcttgaggctttgaggggaaatgcagatttggcttacatcctgagcatggagccctgtggccactgcctcattatcaacaatgtgaacttctgccgtgagtccgggctccgcacccgcactggctccaacatcgactgtgagaagttgcggcgtcgcttctcctcgctgcatttcatggtggaggtgaagggcgacctgactgccaagaaaatggtgctggctttgctggagctggcgcggcaggaccacggtgctctggactgctgcgtggtggtcattctctctcacggctgtcaggccagccacctgcagttcccaggggctgtctacggcacagatggatgccctgtgtcggtcgagaagattgtgaacatcttcaatgggaccagctgccccagcctgggagggaagcccaagctctttttcatccaggcctgtggtggggagcagaaagaccatgggtttgaggtggcctccacttcccctgaagacgagtcccctggcagtaaccccgagccagatgccaccccgttccaggaaggtttgaggaccttcgaccagctggacgccatatctagtttgcccacacccagtgacatctttgtgtcctactctactttcccaggttttgtttcctggagggaccccaagagtggctcctggtacgttgagaccctggacgacatctttgagcagtgggctcactctgaagacctgcagtccctcctgcttagggtcgctaatgctgtttcggtgaaagggatttataaacagatgcctggttgctttaatttcctccggaaaaaacttttctttaaaacatcagctagcagagcc

SEQ ID NO: 49 - protein, 288 aa, synthetic construct
  REGION 1..288: note = Description of Artificial Sequence: Synthetic polypeptide
VDGFGDVGALEALRGNADLAYILSMEPCGHCLIINNVNFCRESGLRTRTGSNIDCEKLRRRFSSLHFMVEVKGDLTAKKMVLALLELARQDHGALDCCVVVILSHGCQASHLQFPGAVYGTDGCPVSVEKIVNIFNGTSCPSLGGKPKLFFIQACGGEQKDHGFEVASTSPEDESPGSNPEPDATPFQEGLRTFDQLDAISSLPTPSDIFVSYSTFPGFVSWRDPKSGSWYVETLDDIFEQWAHSEDLQSLLLRVANAVSVKGIYKQMPGCFNFLRKKLFFKTSASRA

SEQ ID NO: 50 - DNA, 864 bp, synthetic construct
  misc_feature 1..864: note = Description of Artificial Sequence: Synthetic polynucleotide
  source 1..864: mol_type = other DNA
gtcgacggatttggtgatgtcggtgctcttgaggacttgaggggaaatgcagatttggcttacatcctgagcatggagccctgtggccactgcctcattatcaacaatgtgaacttctgccgtgagtccgggctccgcacccgcactggctccaacatcgactgtgagaagttgcggcgtcgcttctcctcgctgcatttcatggtggaggtgaagggcgacctgactgccaagaaaatggtgctggctttgctggagctggcgcggcaggaccacggtgctctggactgctgcgtggtggtcattctctctcacggctgtcaggccagccacctgcagttcccaggggctgtctacggcacagatggatgccctgtgtcggtcgagaagattgtgaacatcttcaatgggaccagctgccccagcctgggagggaagcccaagctctttttcatccaggcctgtggtggggagcagaaagaccatgggtttgaggtggcctccacttcccctgaagacgagtcccctggcagtaaccccgagccagatgccaccccgttccaggaaggtttgaggaccttcgaccagctggacgccatatctagtttgcccacacccagtgacatctttgtgtcctactctactttcccaggttttgtttcctggagggaccccaagagtggctcctggtacgttgagaccctggacgacatctttgagcagtgggctcactctgaagacctgcagtccctcctgcttagggtcgctaatgctgtttcggtgaaagggatttataaacagatgcctggttgctttaatttcctccggaaaaaacttttctttaaaacatcagctagcagagcc

SEQ ID NO: 51 - protein, 288 aa, synthetic construct
  REGION 1..288: note = Description of Artificial Sequence: Synthetic polypeptide
VDGFGDVGALEDLRGNADLAYILSMEPCGHCLIINNVNFCRESGLRTRTGSNIDCEKLRRRFSSLHFMVEVKGDLTAKKMVLALLELARQDHGALDCCVVVILSHGCQASHLQFPGAVYGTDGCPVSVEKIVNIFNGTSCPSLGGKPKLFFIQACGGEQKDHGFEVASTSPEDESPGSNPEPDATPFQEGLRTFDQLDAISSLPTPSDIFVSYSTFPGFVSWRDPKSGSWYVETLDDIFEQWAHSEDLQSLLLRVANAVSVKGIYKQMPGCFNFLRKKLFFKTSASRA

SEQ ID NO: 52 - DNA, 864 bp, synthetic construct
  misc_feature 1..864: note = Description of Artificial Sequence: Synthetic polynucleotide
  source 1..864: mol_type = other DNA
gtcgacggatttggtgatgtcggtgctcttgagagtttgaggggaaatgcagatttggcttacatcctgagcatggagccctgtggccactgcctcattatcaacaatgtgaacttctgccgtgagtccgggctccgcacccgcactggcgccaacatcgactgtgagaagttgcggcgtcgcttctcctcgctgcatttcatggtggaggtgaagggcgacctgactgccaagaaaatggtgctggctttgctggagctggcgcggcaggaccacggtgctctggactgctgcgtggtggtcattctctctcacggctgtcaggccagccacctgcagttcccaggggctgtctacggcacagatggatgccctgtgtcggtcgagaagattgtgaacatcttcaatgggaccagctgccccagcctgggagggaagcccaagctctttttcatccaggcctgtggtggggagcagaaagaccatgggtttgaggtggcctccacttcccctgaagacgagtcccctggcagtaaccccgagccagatgccaccccgttccaggaaggtttgaggaccttcgaccagctggacgccatatctagtttgcccacacccagtgacatctttgtgtcctactctactttcccaggttttgtttcctggagggaccccaagagtggctcctggtacgttgagaccctggacgacatctttgagcagtgggctcactctgaagacctgcagtccctcctgcttagggtcgctaatgctgtttcggtgaaagggatttataaacagatgcctggttgctttaatttcctccggaaaaaacttttctttaaaacatcagctagcagagcc

SEQ ID NO: 53 - protein, 288 aa, synthetic construct
  REGION 1..288: note = Description of Artificial Sequence: Synthetic polypeptide
VDGFGDVGALESLRGNADLAYILSMEPCGHCLIINNVNFCRESGLRTRTGANIDCEKLRRRFSSLHFMVEVKGDLTAKKMVLALLELARQDHGALDCCVVVILSHGCQASHLQFPGAVYGTDGCPVSVEKIVNIFNGTSCPSLGGKPKLFFIQACGGEQKDHGFEVASTSPEDESPGSNPEPDATPFQEGLRTFDQLDAISSLPTPSDIFVSYSTFPGFVSWRDPKSGSWYVETLDDIFEQWAHSEDLQSLLLRVANAVSVKGIYKQMPGCFNFLRKKLFFKTSASRA

SEQ ID NO: 54 - DNA, 864 bp, synthetic construct
  misc_feature 1..864: note = Description of Artificial Sequence: Synthetic polynucleotide
  source 1..864: mol_type = other DNA
gtcgacggatttggtgatgtcggtgctcttgagagtttgaggggaaatgcagatttggcttacatcctgagcatggagccctgtggccactgcctcattatcaacaatgtgaacttctgccgtgagtccgggctccgcacccgcactggctccaacatcgactgtgagaagttgcggcgtcgcttctccgcgctgcatttcatggtggaggtgaagggcgacctgactgccaagaaaatggtgctggctttgctggagctggcgcggcaggaccacggtgctctggactgctgcgtggtggtcattctctctcacggctgtcaggccagccacctgcagttcccaggggctgtctacggcacagatggatgccctgtgtcggtcgagaagattgtgaacatcttcaatgggaccagctgccccagcctgggagggaagcccaagctctttttcatccaggcctgtggtggggagcagaaagaccatgggtttgaggtggcctccacttcccctgaagacgagtcccctggcagtaaccccgagccagatgccaccccgttccaggaaggtttgaggaccttcgaccagctggacgccatatctagtttgcccacacccagtgacatctttgtgtcctactctactttcccaggttttgtttcctggagggaccccaagagtggctcctggtacgttgagaccctggacgacatctttgagcagtgggctcactctgaagacctgcagtccctcctgcttagggtcgctaatgctgtttcggtgaaagggatttataaacagatgcctggttgctttaatttcctccggaaaaaacttttctttaaaacatcagctagcagagcc

SEQ ID NO: 55 - protein, 288 aa, synthetic construct
  REGION 1..288: note = Description of Artificial Sequence: Synthetic polypeptide
VDGFGDVGALESLRGNADLAYILSMEPCGHCLIINNVNFCRESGLRTRTGSNIDCEKLRRRFSALHFMVEVKGDLTAKKMVLALLELARQDHGALDCCVVVILSHGCQASHLQFPGAVYGTDGCPVSVEKIVNIFNGTSCPSLGGKPKLFFIQACGGEQKDHGFEVASTSPEDESPGSNPEPDATPFQEGLRTFDQLDAISSLPTPSDIFVSYSTFPGFVSWRDPKSGSWYVETLDDIFEQWAHSEDLQSLLLRVANAVSVKGIYKQMPGCFNFLRKKLFFKTSASRA

SEQ ID NO: 56 - DNA, 864 bp, synthetic construct
  misc_feature 1..864: note = Description of Artificial Sequence: Synthetic polynucleotide
  source 1..864: mol_type = other DNA
gtcgacggatttggtgatgtcggtgctcttgagagtttgaggggaaatgcagatttggcttacatcctgagcatggagccctgtggccactgcctcattatcaacaatgtgaacttctgccgtgagtccgggctccgcacccgcactggctccaacatcgactgtgagaagttgcggcgtcgcttctccgacctgcatttcatggtggaggtgaagggcgacctgactgccaagaaaatggtgctggctttgctggagctggcgcggcaggaccacggtgctctggactgctgcgtggtggtcattctctctcacggctgtcaggccagccacctgcagttcccaggggctgtctacggcacagatggatgccctgtgtcggtcgagaagattgtgaacatcttcaatgggaccagctgccccagcctgggagggaagcccaagctctttttcatccaggcctgtggtggggagcagaaagaccatgggtttgaggtggcctccacttcccctgaagacgagtcccctggcagtaaccccgagccagatgccaccccgttccaggaaggtttgaggaccttcgaccagctggacgccatatctagtttgcccacacccagtgacatctttgtgtcctactctactttcccaggttttgtttcctggagggaccccaagagtggctcctggtacgttgagaccctggacgacatctttgagcagtgggctcactctgaagacctgcagtccctcctgcttagggtcgctaatgctgtttcggtgaaagggatttataaacagatgcctggttgctttaatttcctccggaaaaaacttttctttaaaacatcagctagcagagcc

SEQ ID NO: 57 - protein, 288 aa, synthetic construct
  REGION 1..288: note = Description of Artificial Sequence: Synthetic polypeptide
VDGFGDVGALESLRGNADLAYILSMEPCGHCLIINNVNFCRESGLRTRTGSNIDCEKLRRRFSDLHFMVEVKGDLTAKKMVLALLELARQDHGALDCCVVVILSHGCQASHLQFPGAVYGTDGCPVSVEKIVNIFNGTSCPSLGGKPKLFFIQACGGEQKDHGFEVASTSPEDESPGSNPEPDATPFQEGLRTFDQLDAISSLPTPSDIFVSYSTFPGFVSWRDPKSGSWYVETLDDIFEQWAHSEDLQSLLLRVANAVSVKGIYKQMPGCFNFLRKKLFFKTSASRA

SEQ ID NO: 58 - DNA, 864 bp, synthetic construct
  misc_feature 1..864: note = Description of Artificial Sequence: Synthetic polynucleotide
  source 1..864: mol_type = other DNA
gtcgacggatttggtgatgtcggtgctcttgagagtttgaggggaaatgcagatttggcttacatcctgagcatggagccctgtggccactgcctcattatcaacaatgtgaacttctgccgtgagtccgggctccgcacccgcactggctccaacatcgactgtgagaagttgcggcgtcgcttctcctcgctgcatttcatggtggaggtgaagggcgacctgactgccaagaaaatggtgctggctttgctggagctggcgcggcaggaccacggtgctctggactgctgcgtggtggtcattctctctcacggctgtcaggccagccacctgcagttcccaggggctgtctacggcacagatggatgccctgtgtcggtcgagaagattgtgaacatcttcaatgggaccagctgccccagcctgggagggaagcccaagctctttttcatccaggccgcgggtggggagcagaaagaccatgggtttgaggtggcctccacttcccctgaagacgagtcccctggcagtaaccccgagccagatgccaccccgttccaggaaggtttgaggaccttcgaccagctggacgccatatctagtttgcccacacccagtgacatctttgtgtcctactctactttcccaggttttgtttcctggagggaccccaagagtggctcctggtacgttgagaccctggacgacatctttgagcagtgggctcactctgaagacctgcagtccctcctgcttagggtcgctaatgctgtttcggtgaaagggatttataaacagatgcctggttgctttaatttcctccggaaaaaacttttctttaaaacatcagctagcagagcc

SEQ ID NO: 59 - protein, 288 aa, synthetic construct
  REGION 1..288: note = Description of Artificial Sequence: Synthetic polypeptide
VDGFGDVGALESLRGNADLAYILSMEPCGHCLIINNVNFCRESGLRTRTGSNIDCEKLRRRFSSLHFMVEVKGDLTAKKMVLALLELARQDHGALDCCVVVILSHGCQASHLQFPGAVYGTDGCPVSVEKIVNIFNGTSCPSLGGKPKLFFIQAAGGEQKDHGFEVASTSPEDESPGSNPEPDATPFQEGLRTFDQLDAISSLPTPSDIFVSYSTFPGFVSWRDPKSGSWYVETLDDIFEQWAHSEDLQSLLLRVANAVSVKGIYKQMPGCFNFLRKKLFFKTSASRA

SEQ ID NO: 60 - DNA, 864 bp, synthetic construct
  misc_feature 1..864: note = Description of Artificial Sequence: Synthetic polynucleotide
  source 1..864: mol_type = other DNA
gtcgacggatttggtgatgtcggtgctcttgagagtttgaggggaaatgcagatttggcttacatcctgagcatggagccctgtggccactgcctcattatcaacaatgtgaacttctgccgtgagtccgggctccgcacccgcactggctccaacatcgactgtgagaagttgcggcgtcgcttctcctcgctgcatttcatggtggaggtgaagggcgacctgactgccaagaaaatggtgctggctttgctggagctggcgcggcaggaccacggtgctctggactgctgcgtggtggtcattctctctcacggctgtcaggccagccacctgcagttcccaggggctgtctacggcacagatggatgccctgtgtcggtcgagaagattgtgaacatcttcaatgggaccagctgccccagcctgggagggaagcccaagctctttttcatccaggcctgtggtggggagcagaaagaccatgggtttgaggtggcctccacttcccctgaagacgagtcccctggcagtaaccccgagccagatggcaccccgttccaggaaggtttgaggaccttcgaccagctggacgccatatctagtttgcccacacccagtgacatctttgtgtcctactctactttcccaggttttgtttcctggagggaccccaagagtggctcctggtacgttgagaccctggacgacatctttgagcagtgggctcactctgaagacctgcagtccctcctgcttagggtcgctaatgctgtttcggtgaaagggatttataaacagatgcctggttgctttaatttcctccggaaaaaacttttctttaaaacatcagctagcagagcc

SEQ ID NO: 61 - protein, 288 aa, synthetic construct
  REGION 1..288: note = Description of Artificial Sequence: Synthetic polypeptide
VDGFGDVGALESLRGNADLAYILSMEPCGHCLIINNVNFCRESGLRTRTGSNIDCEKLRRRFSSLHFMVEVKGDLTAKKMVLALLELARQDHGALDCCVVVILSHGCQASHLQFPGAVYGTDGCPVSVEKIVNIFNGTSCPSLGGKPKLFFIQACGGEQKDHGFEVASTSPEDESPGSNPEPDGTPFQEGLRTFDQLDAISSLPTPSDIFVSYSTFPGFVSWRDPKSGSWYVETLDDIFEQWAHSEDLQSLLLRVANAVSVKGIYKQMPGCFNFLRKKLFFKTSASRA

SEQ ID NO: 62 - DNA, 864 bp, synthetic construct
  misc_feature 1..864: note = Description of Artificial Sequence: Synthetic polynucleotide
  source 1..864: mol_type = other DNA
gtcgacggatttggtgatgtcggtgctcttgagagtttgaggggaaatgcagatttggcttacatcctgagcatggagccctgtggccactgcctcattatcaacaatgtgaacttctgccgtgagtccgggctccgcacccgcactggctccaacatcgactgtgagaagttgcggcgtcgcttctcctcgctgcatttcatggtggaggtgaagggcgacctgactgccaagaaaatggtgctggctttgctggagctggcgcggcaggaccacggtgctctggactgctgcgtggtggtcattctctctcacggctgtcaggccagccacctgcagttcccaggggctgtctacggcacagatggatgccctgtgtcggtcgagaagattgtgaacatcttcaatgggaccagctgccccagcctgggagggaagcccaagctctttttcatccaggcctgtggtggggagcagaaagaccatgggtttgaggtggcctccacttcccctgaagacgagtcccctggcagtaaccccgagccagatgccgccccgttccaggaaggtttgaggaccttcgaccagctggacgccatatctagtttgcccacacccagtgacatctttgtgtcctactctactttcccaggttttgtttcctggagggaccccaagagtggctcctggtacgttgagaccctggacgacatctttgagcagtgggctcactctgaagacctgcagtccctcctgcttagggtcgctaatgctgtttcggtgaaagggatttataaacagatgcctggttgctttaatttcctccggaaaaaacttttctttaaaacatcagctagcagagcc

SEQ ID NO: 63 - protein, 288 aa, synthetic construct
  REGION 1..288: note = Description of Artificial Sequence: Synthetic polypeptide
VDGFGDVGALESLRGNADLAYILSMEPCGHCLIINNVNFCRESGLRTRTGSNIDCEKLRRRFSSLHFMVEVKGDLTAKKMVLALLELARQDHGALDCCVVVILSHGCQASHLQFPGAVYGTDGCPVSVEKIVNIFNGTSCPSLGGKPKLFFIQACGGEQKDHGFEVASTSPEDESPGSNPEPDAAPFQEGLRTFDQLDAISSLPTPSDIFVSYSTFPGFVSWRDPKSGSWYVETLDDIFEQWAHSEDLQSLLLRVANAVSVKGIYKQMPGCFNFLRKKLFFKTSASRA

SEQ ID NO: 64 - DNA, 864 bp, synthetic construct
  misc_feature 1..864: note = Description of Artificial Sequence: Synthetic polynucleotide
  source 1..864: mol_type = other DNA
gtcgacggatttggtgatgtcggtgctcttgagagtttgaggggaaatgcagatttggcttacatcctgagcatggagccctgtggccactgcctcattatcaacaatgtgaacttctgccgtgagtccgggctccgcacccgcactggctccaacatcgactgtgagaagttgcggcgtcgcttctcctcgctgcatttcatggtggaggtgaagggcgacctgactgccaagaaaatggtgctggctttgctggagctggcgcggcaggaccacggtgctctggactgctgcgtggtggtcattctctctcacggctgtcaggccagccacctgcagttcccaggggctgtctacggcacagatggatgccctgtgtcggtcgagaagattgtgaacatcttcaatgggaccagctgccccagcctgggagggaagcccaagctctttttcatccaggcctgtggtggggagcagaaagaccatgggtttgaggtggcctccacttcccctgaagacgagtcccctggcagtaaccccgagccagatgcctgcccgttccaggaaggtttgaggaccttcgaccagctggacgccatatctagtttgcccacacccagtgacatctttgtgtcctactctactttcccaggttttgtttcctggagggaccccaagagtggctcctggtacgttgagaccctggacgacatctttgagcagtgggctcactctgaagacctgcagtccctcctgcttagggtcgctaatgctgtttcggtgaaagggatttataaacagatgcctggttgctttaatttcctccggaaaaaacttttctttaaaacatcagctagcagagcc

SEQ ID NO: 65 - protein, 288 aa, synthetic construct
  REGION 1..288: note = Description of Artificial Sequence: Synthetic polypeptide
VDGFGDVGALESLRGNADLAYILSMEPCGHCLIINNVNFCRESGLRTRTGSNIDCEKLRRRFSSLHFMVEVKGDLTAKKMVLALLELARQDHGALDCCVVVILSHGCQASHLQFPGAVYGTDGCPVSVEKIVNIFNGTSCPSLGGKPKLFFIQACGGEQKDHGFEVASTSPEDESPGSNPEPDACPFQEGLRTFDQLDAISSLPTPSDIFVSYSTFPGFVSWRDPKSGSWYVETLDDIFEQWAHSEDLQSLLLRVANAVSVKGIYKQMPGCFNFLRKKLFFKTSASRA

SEQ ID NO: 66 - DNA, 864 bp, synthetic construct
  misc_feature 1..864: note = Description of Artificial Sequence: Synthetic polynucleotide
  source 1..864: mol_type = other DNA
gtcgacggatttggtgatgtcggtgctcttgagagtttgaggggaaatgcagatttggcttacatcctgagcatggagccctgtggccactgcctcattatcaacaatgtgaacttctgccgtgagtccgggctccgcacccgcactggctccaacatcgactgtgagaagttgcggcgtcgcttctcctcgctgcatttcatggtggaggtgaagggcgacctgactgccaagaaaatggtgctggctttgctggagctggcgcggcaggaccacggtgctctggactgctgcgtggtggtcattctctctcacggctgtcaggccagccacctgcagttcccaggggctgtctacggcacagatggatgccctgtgtcggtcgagaagattgtgaacatcttcaatgggaccagctgccccagcctgggagggaagcccaagctctttttcatccaggcctgtggtggggagcagaaagaccatgggtttgaggtggcctccacttcccctgaagacgagtcccctggcagtaaccccgagccagatgcctccccgttccaggaaggtttgaggaccttcgaccagctggacgccatatctagtttgcccacacccagtgacatctttgtgtcctactctactttcccaggttttgtttcctggagggaccccaagagtggctcctggtacgttgagaccctggacgacatctttgagcagtgggctcactctgaagacctgcagtccctcctgcttagggtcgctaatgctgtttcggtgaaagggatttataaacagatgcctggttgctttaatttcctccggaaaaaacttttctttaaaacatcagctagcagagcc

SEQ ID NO: 67 - protein, 288 aa, synthetic construct
  REGION 1..288: note = Description of Artificial Sequence: Synthetic polypeptide
VDGFGDVGALESLRGNADLAYILSMEPCGHCLIINNVNFCRESGLRTRTGSNIDCEKLRRRFSSLHFMVEVKGDLTAKKMVLALLELARQDHGALDCCVVVILSHGCQASHLQFPGAVYGTDGCPVSVEKIVNIFNGTSCPSLGGKPKLFFIQACGGEQKDHGFEVASTSPEDESPGSNPEPDASPFQEGLRTFDQLDAISSLPTPSDIFVSYSTFPGFVSWRDPKSGSWYVETLDDIFEQWAHSEDLQSLLLRVANAVSVKGIYKQMPGCFNFLRKKLFFKTSASRA

SEQ ID NO: 68 - DNA, 864 bp, synthetic construct
  misc_feature 1..864: note = Description of Artificial Sequence: Synthetic polynucleotide
  source 1..864: mol_type = other DNA
gtcgacggatttggtgatgtcggtgctcttgagagtttgaggggaaatgcagatttggcttacatcctgagcatggagccctgtggccactgcctcattatcaacaatgtgaacttctgccgtgagtccgggctccgcacccgcactggctccaacatcgactgtgagaagttgcggcgtcgcttctcctcgctgcatttcatggtggaggtgaagggcgacctgactgccaagaaaatggtgctggctttgctggagctggcgcggcaggaccacggtgctctggactgctgcgtggtggtcattctctctcacggctgtcaggccagccacctgcagttcccaggggctgtctacggcacagatggatgccctgtgtcggtcgagaagattgtgaacatcttcaatgggaccagctgccccagcctgggagggaagcccaagctctttttcatccaggcctgtggtggggagcagaaagaccatgggtttgaggtggcctccacttcccctgaagacgagtcccctggcagtaaccccgagccagatgccaccccgttccaggaaggtttgaggaccaaggaccagctggacgccatatctagtttgcccacacccagtgacatctttgtgtcctactctactttcccaggttttgtttcctggagggaccccaagagtggctcctggtacgttgagaccctggacgacatctttgagcagtgggctcactctgaagacctgcagtccctcctgcttagggtcgctaatgctgtttcggtgaaagggatttataaacagatgcctggttgctttaatttcctccggaaaaaacttttctttaaaacatcagctagcagagcc

SEQ ID NO: 69 - protein, 288 aa, synthetic construct
  REGION 1..288: note = Description of Artificial Sequence: Synthetic polypeptide
VDGFGDVGALESLRGNADLAYILSMEPCGHCLIINNVNFCRESGLRTRTGSNIDCEKLRRRFSSLHFMVEVKGDLTAKKMVLALLELARQDHGALDCCVVVILSHGCQASHLQFPGAVYGTDGCPVSVEKIVNIFNGTSCPSLGGKPKLFFIQACGGEQKDHGFEVASTSPEDESPGSNPEPDATPFQEGLRTKDQLDAISSLPTPSDIFVSYSTFPGFVSWRDPKSGSWYVETLDDIFEQWAHSEDLQSLLLRVANAVSVKGIYKQMPGCFNFLRKKLFFKTSASRA

SEQ ID NO: 70 - DNA, 864 bp, synthetic construct
  misc_feature 1..864: note = Description of Artificial Sequence: Synthetic polynucleotide
  source 1..864: mol_type = other DNA
gtcgacggatttggtgatgtcggtgctcttgagagtttgaggggaaatgcagatttggcttacatcctgagcatggagccctgtggccactgcctcattatcaacaatgtgaacttctgccgtgagtccgggctccgcacccgcactggctccaacatcgactgtgagaagttgcggcgtcgcttctcctcgctgcatttcatggtggaggtgaagggcgacctgactgccaagaaaatggtgctggctttgctggagctggcgcggcaggaccacggtgctctggactgctgcgtggtggtcattctctctcacggctgtcaggccagccacctgcagttcccaggggctgtctacggcacagatggatgccctgtgtcggtcgagaagattgtgaacatcttcaatgggaccagctgccccagcctgggagggaagcccaagctctttttcatccaggcctgtggtggggagcagaaagaccatgggtttgaggtggcctccacttcccctgaagacgagtcccctggcagtaaccccgagccagatgccaccccgttccaggaaggtttgaggaccttcaagcagctggacgccatatctagtttgcccacacccagtgacatctttgtgtcctactctactttcccaggttttgtttcctggagggaccccaagagtggctcctggtacgttgagaccctggacgacatctttgagcagtgggctcactctgaagacctgcagtccctcctgcttagggtcgctaatgctgtttcggtgaaagggatttataaacagatgcctggttgctttaatttcctccggaaaaaacttttctttaaaacatcagctagcagagcc

SEQ ID NO: 71 - protein, 288 aa, synthetic construct
  REGION 1..288: note = Description of Artificial Sequence: Synthetic polypeptide
VDGFGDVGALESLRGNADLAYILSMEPCGHCLIINNVNFCRESGLRTRTGSNIDCEKLRRRFSSLHFMVEVKGDLTAKKMVLALLELARQDHGALDCCVVVILSHGCQASHLQFPGAVYGTDGCPVSVEKIVNIFNGTSCPSLGGKPKLFFIQACGGEQKDHGFEVASTSPEDESPGSNPEPDATPFQEGLRTFKQLDAISSLPTPSDIFVSYSTFPGFVSWRDPKSGSWYVETLDDIFEQWAHSEDLQSLLLRVANAVSVKGIYKQMPGCFNFLRKKLFFKTSASRA

SEQ ID NO: 72 - DNA, 864 bp, synthetic construct
  misc_feature 1..864: note = Description of Artificial Sequence: Synthetic polynucleotide
  source 1..864: mol_type = other DNA
gtcgacggatttggtgatgtcggtgctcttgagagtttgaggggaaatgcagatttggcttacatcctgagcatggagccctgtggccactgcctcattatcaacaatgtgaacttctgccgtgagtccgggctccgcacccgcactggctccaacatcgactgtgagaagttgcggcgtcgcttctcctcgctgcatttcatggtggaggtgaagggcgacctgactgccaagaaaatggtgctggctttgctggagctggcgcggcaggaccacggtgctctggactgctgcgtggtggtcattctctctcacggctgtcaggccagccacctgcagttcccaggggctgtctacggcacagatggatgccctgtgtcggtcgagaagattgtgaacatcttcaatgggaccagctgccccagcctgggagggaagcccaagctctttttcatccaggcctgtggtggggagcagaaagaccatgggtttgaggtggcctccacttcccctgaagacgagtcccctggcagtaaccccgagccagatgccaccccgttccaggaaggtttgaggaccttcaggcagctggacgccatatctagtttgcccacacccagtgacatctttgtgtcctactctactttcccaggttttgtttcctggagggaccccaagagtggctcctggtacgttgagaccctggacgacatctttgagcagtgggctcactctgaagacctgcagtccctcctgcttagggtcgctaatgctgtttcggtgaaagggatttataaacagatgcctggttgctttaatttcctccggaaaaaacttttctttaaaacatcagctagcagagcc

SEQ ID NO: 73 - protein, 288 aa, synthetic construct
  REGION 1..288: note = Description of Artificial Sequence: Synthetic polypeptide
VDGFGDVGALESLRGNADLAYILSMEPCGHCLIINNVNFCRESGLRTRTGSNIDCEKLRRRFSSLHFMVEVKGDLTAKKMVLALLELARQDHGALDCCVVVILSHGCQASHLQFPGAVYGTDGCPVSVEKIVNIFNGTSCPSLGGKPKLFFIQACGGEQKDHGFEVASTSPEDESPGSNPEPDATPFQEGLRTFRQLDAISSLPTPSDIFVSYSTFPGFVSWRDPKSGSWYVETLDDIFEQWAHSEDLQSLLLRVANAVSVKGIYKQMPGCFNFLRKKLFFKTSASRA

SEQ ID NO: 74 - DNA, 864 bp, synthetic construct
  misc_feature 1..864: note = Description of Artificial Sequence: Synthetic polynucleotide
  source 1..864: mol_type = other DNA
gtcgacggatttggtgatgtcggtgctcttgagagtttgaggggaaatgcagatttggcttacatcctgagcatggagccctgtggccactgcctcattatcaacaatgtgaacttctgccgtgagtccgggctccgcacccgcactggctccaacatcgactgtgagaagttgcggcgtcgcttctcctcgctgcatttcatggtggaggtgaagggcgacctgactgccaagaaaatggtgctggctttgctggagctggcgcggcaggaccacggtgctctggactgctgcgtggtggtcattctctctcacggctgtcaggccagccacctgcagttcccaggggctgtctacggcacagatggatgccctgtgtcggtcgagaagattgtgaacatcttcaatgggaccagctgccccagcctgggagggaagcccaagctctttttcatccaggcctgtggtggggagcagaaagaccatgggtttgaggtggcctccacttcccctgaagacgagtcccctggcagtaaccccgagccagatgccaccccgttccaggaaggtttgaggaccttcggccagctggacgccatatctagtttgcccacacccagtgacatctttgtgtcctactctactttcccaggttttgtttcctggagggaccccaagagtggctcctggtacgttgagaccctggacgacatctttgagcagtgggctcactctgaagacctgcagtccctcctgcttagggtcgctaatgctgtttcggtgaaagggatttataaacagatgcctggttgctttaatttcctccggaaaaaacttttctttaaaacatcagctagcagagcc

SEQ ID NO: 75 - protein, 288 aa, synthetic construct
  REGION 1..288: note = Description of Artificial Sequence: Synthetic polypeptide
VDGFGDVGALESLRGNADLAYILSMEPCGHCLIINNVNFCRESGLRTRTGSNIDCEKLRRRFSSLHFMVEVKGDLTAKKMVLALLELARQDHGALDCCVVVILSHGCQASHLQFPGAVYGTDGCPVSVEKIVNIFNGTSCPSLGGKPKLFFIQACGGEQKDHGFEVASTSPEDESPGSNPEPDATPFQEGLRTFGQLDAISSLPTPSDIFVSYSTFPGFVSWRDPKSGSWYVETLDDIFEQWAHSEDLQSLLLRVANAVSVKGIYKQMPGCFNFLRKKLFFKTSASRA

SEQ ID NO: 76 - DNA, 864 bp, synthetic construct
  misc_feature 1..864: note = Description of Artificial Sequence: Synthetic polynucleotide
  source 1..864: mol_type = other DNA
gtcgacggatttggtgatgtcggtgctcttgagagtttgaggggaaatgcagatttggcttacatcctgagcatggagccctgtggccactgcctcattatcaacaatgtgaacttctgccgtgagtccgggctccgcacccgcactggctccaacatcgactgtgagaagttgcggcgtcgcttctcctcgctgcatttcatggtggaggtgaagggcgacctgactgccaagaaaatggtgctggctttgctggagctggcgcggcaggaccacggtgctctggactgctgcgtggtggtcattctctctcacggctgtcaggccagccacctgcagttcccaggggctgtctacggcacagatggatgccctgtgtcggtcgagaagattgtgaacatcttcaatgggaccagctgccccagcctgggagggaagcccaagctctttttcatccaggcctgtggtggggagcagaaagaccatgggtttgaggtggcctccacttcccctgaagacgagtcccctggcagtaaccccgagccagatgccaccccgttccaggaaggtttgaggaccttcgacaagctggacgccatatctagtttgcccacacccagtgacatctttgtgtcctactctactttcccaggttttgtttcctggagggaccccaagagtggctcctggtacgttgagaccctggacgacatctttgagcagtgggctcactctgaagacctgcagtccctcctgcttagggtcgctaatgctgtttcggtgaaagggatttataaacagatgcctggttgctttaatttcctccggaaaaaacttttctttaaaacatcagctagcagagcc

SEQ ID NO: 77 - protein, 288 aa, synthetic construct
  REGION 1..288: note = Description of Artificial Sequence: Synthetic polypeptide
VDGFGDVGALESLRGNADLAYILSMEPCGHCLIINNVNFCRESGLRTRTGSNIDCEKLRRRFSSLHFMVEVKGDLTAKKMVLALLELARQDHGALDCCVVVILSHGCQASHLQFPGAVYGTDGCPVSVEKIVNIFNGTSCPSLGGKPKLFFIQACGGEQKDHGFEVASTSPEDESPGSNPEPDATPFQEGLRTFDKLDAISSLPTPSDIFVSYSTFPGFVSWRDPKSGSWYVETLDDIFEQWAHSEDLQSLLLRVANAVSVKGIYKQMPGCFNFLRKKLFFKTSASRA

SEQ ID NO: 78 - DNA, 864 bp, synthetic construct
  misc_feature 1..864: note = Description of Artificial Sequence: Synthetic polynucleotide
  source 1..864: mol_type = other DNA
gtcgacggatttggtgatgtcggtgctcttgagagtttgaggggaaatgcagatttggcttacatcctgagcatggagccctgtggccactgcctcattatcaacaatgtgaacttctgccgtgagtccgggctccgcacccgcactggctccaacatcgactgtgagaagttgcggcgtcgcttctcctcgctgcatttcatggtggaggtgaagggcgacctgactgccaagaaaatggtgctggctttgctggagctggcgcggcaggaccacggtgctctggactgctgcgtggtggtcattctctctcacggctgtcaggccagccacctgcagttcccaggggctgtctacggcacagatggatgccctgtgtcggtcgagaagattgtgaacatcttcaatgggaccagctgccccagcctgggagggaagcccaagctctttttcatccaggcctgtggtggggagcagaaagaccatgggtttgaggtggcctccacttcccctgaagacgagtcccctggcagtaaccccgagccagatgccaccccgttccaggaaggtttgaggaccttcgacaggctggacgccatatctagtttgcccacacccagtgacatctttgtgtcctactctactttcccaggttttgtttcctggagggaccccaagagtggctcctggtacgttgagaccctggacgacatctttgagcagtgggctcactctgaagacctgcagtccctcctgcttagggtcgctaatgctgtttcggtgaaagggatttataaacagatgcctggttgctttaatttcctccggaaaaaacttttctttaaaacatcagctagcagagcc

SEQ ID NO: 79 - protein, 288 aa, synthetic construct
  REGION 1..288: note = Description of Artificial Sequence: Synthetic polypeptide
VDGFGDVGALESLRGNADLAYILSMEPCGHCLIINNVNFCRESGLRTRTGSNIDCEKLRRRFSSLHFMVEVKGDLTAKKMVLALLELARQDHGALDCCVVVILSHGCQASHLQFPGAVYGTDGCPVSVEKIVNIFNGTSCPSLGGKPKLFFIQACGGEQKDHGFEVASTSPEDESPGSNPEPDATPFQEGLRTFDRLDAISSLPTPSDIFVSYSTFPGFVSWRDPKSGSWYVETLDDIFEQWAHSEDLQSLLLRVANAVSVKGIYKQMPGCFNFLRKKLFFKTSASRA

SEQ ID NO: 80 - DNA, 864 bp, synthetic construct
  misc_feature 1..864: note = Description of Artificial Sequence: Synthetic polynucleotide
  source 1..864: mol_type = other DNA
gtcgacggatttggtgatgtcggtgctcttgagagtttgaggggaaatgcagatttggcttacatcctgagcatggagccctgtggccactgcctcattatcaacaatgtgaacttctgccgtgagtccgggctccgcacccgcactggctccaacatcgactgtgagaagttgcggcgtcgcttctcctcgctgcatttcatggtggaggtgaagggcgacctgactgccaagaaaatggtgctggctttgctggagctggcgcggcaggaccacggtgctctggactgctgcgtggtggtcattctctctcacggctgtcaggccagccacctgcagttcccaggggctgtctacggcacagatggatgccctgtgtcggtcgagaagattgtgaacatcttcaatgggaccagctgccccagcctgggagggaagcccaagctctttttcatccaggcctgtggtggggagcagaaagaccatgggtttgaggtggcctccacttcccctgaagacgagtcccctggcagtaaccccgagccagatgccaccccgttccaggaaggtttgaggaccttcgaccagaaggacgccatatctagtttgcccacacccagtgacatctttgtgtcctactctactttcccaggttttgtttcctggagggaccccaagagtggctcctggtacgttgagaccctggacgacatctttgagcagtgggctcactctgaagacctgcagtccctcctgcttagggtcgctaatgctgtttcggtgaaagggatttataaacagatgcctggttgctttaatttcctccggaaaaaacttttctttaaaacatcagctagcagagcc

SEQ ID NO: 81 - protein, 288 aa, synthetic construct
  REGION 1..288: note = Description of Artificial Sequence: Synthetic polypeptide
VDGFGDVGALESLRGNADLAYILSMEPCGHCLIINNVNFCRESGLRTRTGSNIDCEKLRRRFSSLHFMVEVKGDLTAKKMVLALLELARQDHGALDCCVVVILSHGCQASHLQFPGAVYGTDGCPVSVEKIVNIFNGTSCPSLGGKPKLFFIQACGGEQKDHGFEVASTSPEDESPGSNPEPDATPFQEGLRTFDQKDAISSLPTPSDIFVSYSTFPGFVSWRDPKSGSWYVETLDDIFEQWAHSEDLQSLLLRVANAVSVKGIYKQMPGCFNFLRKKLFFKTSASRA

SEQ ID NO: 82 - DNA, 864 bp, synthetic construct
  misc_feature 1..864: note = Description of Artificial Sequence: Synthetic polynucleotide
  source 1..864: mol_type = other DNA
gtcgacggatttggtgatgtcggtgctcttgagagtttgaggggaaatgcagatttggcttacatcctgagcatggagccctgtggccactgcctcattatcaacaatgtgaacttctgccgtgagtccgggctccgcacccgcactggctccaacatcgactgtgagaagttgcggcgtcgcttctcctcgctgcatttcatggtggaggtgaagggcgacctgactgccaagaaaatggtgctggctttgctggagctggcgcggcaggaccacggtgctctggactgctgcgtggtggtcattctctctcacggctgtcaggccagccacctgcagttcccaggggctgtctacggcacagatggatgccctgtgtcggtcgagaagattgtgaacatcttcaatgggaccagctgccccagcctgggagggaagcccaagctctttttcatccaggcctgtggtggggagcagaaagaccatgggtttgaggtggcctccacttcccctgaagacgagtcccctggcagtaaccccgagccagatgccaccccgttccaggaaggtttgaggaccttcgaccaggaggacgccatatctagtttgcccacacccagtgacatctttgtgtcctactctactttcccaggttttgtttcctggagggaccccaagagtggctcctggtacgttgagaccctggacgacatctttgagcagtgggctcactctgaagacctgcagtccctcctgcttagggtcgctaatgctgtttcggtgaaagggatttataaacagatgcctggttgctttaatttcctccggaaaaaacttttctttaaaacatcagctagcagagcc

SEQ ID NO: 83 - protein, 288 aa, synthetic construct
  REGION 1..288: note = Description of Artificial Sequence: Synthetic polypeptide
VDGFGDVGALESLRGNADLAYILSMEPCGHCLIINNVNFCRESGLRTRTGSNIDCEKLRRRFSSLHFMVEVKGDLTAKKMVLALLELARQDHGALDCCVVVILSHGCQASHLQFPGAVYGTDGCPVSVEKIVNIFNGTSCPSLGGKPKLFFIQACGGEQKDHGFEVASTSPEDESPGSNPEPDATPFQEGLRTFDQEDAISSLPTPSDIFVSYSTFPGFVSWRDPKSGSWYVETLDDIFEQWAHSEDLQSLLLRVANAVSVKGIYKQMPGCFNFLRKKLFFKTSASRA

SEQ ID NO: 84 - DNA, 864 bp, synthetic construct
  misc_feature 1..864: note = Description of Artificial Sequence: Synthetic polynucleotide
  source 1..864: mol_type = other DNA
gtcgacggatttggtgatgtcggtgctcttgagagtttgaggggaaatgcagatttggcttacatcctgagcatggagccctgtggccactgcctcattatcaacaatgtgaacttctgccgtgagtccgggctccgcacccgcactggctccaacatcgactgtgagaagttgcggcgtcgcttctcctcgctgcatttcatggtggaggtgaagggcgacctgactgccaagaaaatggtgctggctttgctggagctggcgcggcaggaccacggtgctctggactgctgcgtggtggtcattctctctcacggctgtcaggccagccacctgcagttcccaggggctgtctacggcacagatggatgccctgtgtcggtcgagaagattgtgaacatcttcaatgggaccagctgccccagcctgggagggaagcccaagctctttttcatccaggcctgtggtggggagcagaaagaccatgggtttgaggtggcctccacttcccctgaagacgagtcccctggcagtaaccccgagccagatgccaccccgttccaggaaggtttgaggaccttcgaccagggcgacgccatatctagtttgcccacacccagtgacatctttgtgtcctactctactttcccaggttttgtttcctggagggaccccaagagtggctcctggtacgttgagaccctggacgacatctttgagcagtgggctcactctgaagacctgcagtccctcctgcttagggtcgctaatgctgtttcggtgaaagggatttataaacagatgcctggttgctttaatttcctccggaaaaaacttttctttaaaacatcagctagcagagcc

SEQ ID NO: 85 - protein, 288 aa, synthetic construct
  REGION 1..288: note = Description of Artificial Sequence: Synthetic polypeptide
VDGFGDVGALESLRGNADLAYILSMEPCGHCLIINNVNFCRESGLRTRTGSNIDCEKLRRRFSSLHFMVEVKGDLTAKKMVLALLELARQDHGALDCCVVVILSHGCQASHLQFPGAVYGTDGCPVSVEKIVNIFNGTSCPSLGGKPKLFFIQACGGEQKDHGFEVASTSPEDESPGSNPEPDATPFQEGLRTFDQGDAISSLPTPSDIFVSYSTFPGFVSWRDPKSGSWYVETLDDIFEQWAHSEDLQSLLLRVANAVSVKGIYKQMPGCFNFLRKKLFFKTSASRA

SEQ ID NO: 86 - DNA, 864 bp, synthetic construct
  misc_feature 1..864: note = Description of Artificial Sequence: Synthetic polynucleotide
  source 1..864: mol_type = other DNA
gtcgacggatttggtgatgtcggtgctcttgagagtttgaggggaaatgcagatttggcttacatcctgagcatggagccctgtggccactgcctcattatcaacaatgtgaacttctgccgtgagtccgggctccgcacccgcactggctccaacatcgactgtgagaagttgcggcgtcgcttctcctcgctgcatttcatggtggaggtgaagggcgacctgactgccaagaaaatggtgctggctttgctggagctggcgcggcaggaccacggtgctctggactgctgcgtggtggtcattctctctcacggctgtcaggccagccacctgcagttcccaggggctgtctacggcacagatggatgccctgtgtcggtcgagaagattgtgaacatcttcaatgggaccagctgccccagcctgggagggaagcccaagctctttttcatccaggcctgtggtggggagcagaaagaccatgggtttgaggtggcctccacttcccctgaagacgagtcccctggcagtaaccccgagccagatgccaccccgttccaggaaggtttgaggaccttcgaccagctggccgccatatctagtttgcccacacccagtgacatctttgtgtcctactctactttcccaggttttgtttcctggagggaccccaagagtggctcctggtacgttgagaccctggacgacatctttgagcagtgggctcactctgaagacctgcagtccctcctgcttagggtcgctaatgctgtttcggtgaaagggatttataaacagatgcctggttgctttaatttcctccggaaaaaacttttctttaaaacatcagctagcagagcc

SEQ ID NO: 87 - protein, 288 aa, synthetic construct
  REGION 1..288: note = Description of Artificial Sequence: Synthetic polypeptide
VDGFGDVGALESLRGNADLAYILSMEPCGHCLIINNVNFCRESGLRTRTGSNIDCEKLRRRFSSLHFMVEVKGDLTAKKMVLALLELARQDHGALDCCVVVILSHGCQASHLQFPGAVYGTDGCPVSVEKIVNIFNGTSCPSLGGKPKLFFIQACGGEQKDHGFEVASTSPEDESPGSNPEPDATPFQEGLRTFDQLAAISSLPTPSDIFVSYSTFPGFVSWRDPKSGSWYVETLDDIFEQWAHSEDLQSLLLRVANAVSVKGIYKQMPGCFNFLRKKLFFKTSASRA

SEQ ID NO: 88 - DNA, 864 bp, synthetic construct; identical to SEQ ID NO: 86
  misc_feature 1..864: note = Description of Artificial Sequence: Synthetic polynucleotide
  source 1..864: mol_type = other DNA

SEQ ID NO: 89 - protein, 288 aa, synthetic construct
  REGION 1..288: note = Description of Artificial Sequence: Synthetic polypeptide
VDGFGDVGALESLRGNADLAYILSMEPCGHCLIINNVNFCRESGLRTRTGSNIDCEKLRRRFSSLHFMVEVKGDLTAKKMVLALLELARQDHGALDCCVVVILSHGCQASHLQFPGAVYGTDGCPVSVEKIVNIFNGTSCPSLGGKPKLFFIQACGGEQKDHGFEVASTSPEDESPGSNPEPDATPFQEGLRTFDQLEAISSLPTPSDIFVSYSTFPGFVSWRDPKSGSWYVETLDDIFEQWAHSEDLQSLLLRVANAVSVKGIYKQMPGCFNFLRKKLFFKTSASRA

SEQ ID NO: 90 - DNA, 864 bp, synthetic construct; identical to SEQ ID NO: 86
  misc_feature 1..864: note = Description of Artificial Sequence: Synthetic polynucleotide
  source 1..864: mol_type = other DNA

SEQ ID NO: 91 - protein, 288 aa, synthetic construct
  REGION 1..288: note = Description of Artificial Sequence: Synthetic polypeptide
VDGFGDVGALESLRGNADLAYILSMEPCGHCLIINNVNFCRESGLRTRTGSNIDCEKLRRRFSSLHFMVEVKGDLTAKKMVLALLELARQDHGALDCCVVVILSHGCQASHLQFPGAVYGTDGCPVSVEKIVNIFNGTSCPSLGGKPKLFFIQACGGEQKDHGFEVASTSPEDESPGSNPEPDATPFQEGLRTFDQLNAISSLPTPSDIFVSYSTFPGFVSWRDPKSGSWYVETLDDIFEQWAHSEDLQSLLLRVANAVSVKGIYKQMPGCFNFLRKKLFFKTSASRA

SEQ ID NO: 92 - DNA, 864 bp, synthetic construct; identical to SEQ ID NO: 86
  misc_feature 1..864: note = Description of Artificial Sequence: Synthetic polynucleotide
  source 1..864: mol_type = other DNA

SEQ ID NO: 93 - protein, 288 aa, synthetic construct
  REGION 1..288: note = Description of Artificial Sequence: Synthetic polypeptide
VDGFGDVGALESLRGNADLAYILSMEPCGHCLIINNVNFCRESGLRTRTGSNIDCEKLRRRFSSLHFMVEVKGDLTAKKMVLALLELARQDHGALDCCVVVILSHGCQASHLQFPGAVYGTDGCPVSVEKIVNIFNGTSCPSLGGKPKLFFIQACGGEQKDHGFEVASTSPEDESPGSNPEPDATPFQEGLRTFDQLVAISSLPTPSDIFVSYSTFPGFVSWRDPKSGSWYVETLDDIFEQWAHSEDLQSLLLRVANAVSVKGIYKQMPGCFNFLRKKLFFKTSASRA

SEQ ID NO: 94 - DNA, 864 bp, synthetic construct; identical to SEQ ID NO: 86
  misc_feature 1..864: note = Description of Artificial Sequence: Synthetic polynucleotide
  source 1..864: mol_type = other DNA

SEQ ID NO: 95 - protein, 288 aa, synthetic construct
  REGION 1..288: note = Description of Artificial Sequence: Synthetic polypeptide
VDGFGDVGALESLRGNADLAYILSMEPCGHCLIINNVNFCRESGLRTRTGSNIDCEKLRRRFSSLHFMVEVKGDLTAKKMVLALLELARQDHGALDCCVVVILSHGCQASHLQFPGAVYGTDGCPVSVEKIVNIFNGTSCPSLGGKPKLFFIQACGGEQKDHGFEVASTSPEDESPGSNPEPDATPFQEGLRTFDQLGAISSLPTPSDIFVSYSTFPGFVSWRDPKSGSWYVETLDDIFEQWAHSEDLQSLLLRVANAVSVKGIYKQMPGCFNFLRKKLFFKTSASRA

SEQ ID NO: 96 - DNA, 864 bp, synthetic construct; identical to SEQ ID NO: 86
  misc_feature 1..864: note = Description of Artificial Sequence: Synthetic polynucleotide
  source 1..864: mol_type = other DNA

SEQ ID NO: 97 - protein, 288 aa, synthetic construct
  REGION 1..288: note = Description of Artificial Sequence: Synthetic polypeptide
VDGFGDVGALESLRGNADLAYILSMEPCGHCLIINNVNFCRESGLRTRTGSNIDCEKLRRRFSSLHFMVEVKGDLTAKKMVLALLELARQDHGALDCCVVVILSHGCQASHLQFPGAVYGTDGCPVSVEKIVNIFNGTSCPSLGGKPKLFFIQACGGEQKDHGFEVASTSPEDESPGSNPEPDATPFQEGLRTFDQLSAISSLPTPSDIFVSYSTFPGFVSWRDPKSGSWYVETLDDIFEQWAHSEDLQSLLLRVANAVSVKGIYKQMPGCFNFLRKKLFFKTSASRA

SEQ ID NO: 98 - DNA, 864 bp, synthetic construct
  misc_feature 1..864: note = Description of Artificial Sequence: Synthetic polynucleotide
  source 1..864: mol_type = other DNA
gtcgacggatttggtgatgtcggtgctcttgagagtttgaggggaaatgcagatttggcttacatcctgagcatggagccctgtggccactgcctcattatcaacaatgtgaacttctgccgtgagtccgggctccgcacccgcactggctccaacatcgactgtgagaagttgcggcgtcgcttctcctcgctgcatttcatggtggaggtgaagggcgacctgactgccaagaaaatggtgctggctttgctggagctggcgcggcaggaccacggtgctctggactgctgcgtggtggtcattctctctcacggctgtcaggccagccacctgcagttcccaggggctgtctacggcacagatggatgccctgtgtcggtcgagaagattgtgaacatcttcaatgggaccagctgccccagcctgggagggaagcccaagctctttttcatccaggcctgtggtggggagcagaaagaccatgggtttgaggtggcctccacttcccctgaagacgagtcccctggcagtaaccccgagccagatgccaccccgttccaggaaggtttgaggaccttcgaccagctggacaagatatctagtttgcccacacccagtgacatctttgtgtcctactctactttcccaggttttgtttcctggagggaccccaagagtggctcctggtacgttgagaccctggacgacatctttgagcagtgggctcactctgaagacctgcagtccctcctgcttagggtcgctaatgctgtttcggtgaaagggatttataaacagatgcctggttgctttaatttcctccggaaaaaacttttctttaaaacatcagctagcagagcc

SEQ ID NO: 99 - protein, 288 aa, synthetic construct
  REGION 1..288: note = Description of Artificial Sequence: Synthetic polypeptide
VDGFGDVGALESLRGNADLAYILSMEPCGHCLIINNVNFCRESGLRTRTGSNIDCEKLRRRFSSLHFMVEVKGDLTAKKMVLALLELARQDHGALDCCVVVILSHGCQASHLQFPGAVYGTDGCPVSVEKIVNIFNGTSCPSLGGKPKLFFIQACGGEQKDHGFEVASTSPEDESPGSNPEPDATPFQEGLRTFDQLDKISSLPTPSDIFVSYSTFPGFVSWRDPKSGSWYVETLDDIFEQWAHSEDLQSLLLRVANAVSVKGIYKQMPGCFNFLRKKLFFKTSASRA

SEQ ID NO: 100 - DNA, 864 bp, synthetic construct
  misc_feature 1..864: note = Description of Artificial Sequence: Synthetic polynucleotide
  source 1..864: mol_type = other DNA
gtcgacggatttggtgatgtcggtgctcttgagagtttgaggggaaatgcagatttggcttacatcctgagcatggagccctgtggccactgcctcattatcaacaatgtgaacttctgccgtgagtccgggctccgcacccgcactggctccaacatcgactgtgagaagttgcggcgtcgcttctcctcgctgcatttcatggtggaggtgaagggcgacctgactgccaagaaaatggtgctggctttgctggagctggcgcggcaggaccacggtgctctggactgctgcgtggtggtcattctctctcacggctgtcaggccagccacctgcagttcccaggggctgtctacggcacagatggatgccctgtgtcggtcgagaagattgtgaacatcttcaatgggaccagctgccccagcctgggagggaagcccaagctctttttcatccaggcctgtggtggggagcagaaagaccatgggtttgaggtggcctccacttcccctgaagacgagtcccctggcagtaaccccgagccagatgccaccccgttccaggaaggtttgaggaccttcgaccagctggacgccatatctagtttgcccacacccagtgacatctttgtgtcctactctactttcccaggttttgtttcctggagggaccccaagagtggctcctggtacgttgagaccctggacgacatctttgagcagtgggctcactctgaagacctgcagtccctcctgcttagggtcgctaatgctgtttcggtgaaagggatttataaacagatgcctggttgctataatttcctccggaaaaaacttttctttaaaacatcagctagcagagcc

SEQ ID NO: 101 - protein, 288 aa, synthetic construct
  REGION 1..288: note = Description of Artificial Sequence: Synthetic polypeptide
VDGFGDVGALESLRGNADLAYILSMEPCGHCLIINNVNFCRESGLRTRTGSNIDCEKLRRRFSSLHFMVEVKGDLTAKKMVLALLELARQDHGALDCCVVVILSHGCQASHLQFPGAVYGTDGCPVSVEKIVNIFNGTSCPSLGGKPKLFFIQACGGEQKDHGFEVASTSPEDESPGSNPEPDATPFQEGLRTFDQLDAISSLPTPSDIFVSYSTFPGFVSWRDPKSGSWYVETLDDIFEQWAHSEDLQSLLLRVANAVSVKGIYKQMPGCYNFLRKKLFFKTSASRA

SEQ ID NO: 102 - DNA, 864 bp, synthetic construct
  misc_feature 1..864: note = Description of Artificial Sequence: Synthetic polynucleotide
  source 1..864: mol_type = other DNA
gtcgacggatttggtgatgtcggtgctcttgagagtttgaggggaaatgcagatttggcttacatcctgagcatggagccctgtggccactgcctcattatcaacaatgtgaacttctgccgtgagtccgggctccgcacccgcactggctccaacatcgactgtgagaagttgcggcgtcgcttctcctcgctgcatttcatggtggaggtgaagggcgacctgactgccaagaaaatggtgctggctttgctggagctggcgcggcaggaccacggtgctctggactgctgcgtggtggtcattctctctcacggctgtcaggccagccacctgcagttcccaggggctgtctacggcacagatggatgccctgtgtcggtcgagaagattgtgaacatcttcaatgggaccagctgccccagcctgggagggaagcccaagctctttttcatccaggcctgtggtggggagcagaaagaccatgggtttgaggtggcctccacttcccctgaagacgagtcccctggcagtaaccccgagccagatgccaccccgttccaggaaggtttgaggaccttcgaccagctggacgccatatctagtttgcccacacccagtgacatctttgtgtcctactctactttcccaggttttgtttcctggagggaccccaagagtggctcctggtacgttgagaccctggacgacatctttgagcagtgggctcactctgaagacctgcagtccctcctgcttagggtcgctaatgctgtttcggtgaaagggatttataaacagatgcctggttgctggaatttcctccggaaaaaacttttctttaaaacatcagctagcagagcc

SEQ ID NO: 103 - protein, 288 aa, synthetic construct
  REGION 1..288: note = Description of Artificial Sequence: Synthetic polypeptide
VDGFGDVGALESLRGNADLAYILSMEPCGHCLIINNVNFCRESGLRTRTGSNIDCEKLRRRFSSLHFMVEVKGDLTAKKMVLALLELARQDHGALDCCVVVILSHGCQASHLQFPGAVYGTDGCPVSVEKIVNIFNGTSCPSLGGKPKLFFIQACGGEQKDHGFEVASTSPEDESPGSNPEPDATPFQEGLRTFDQLDAISSLPTPSDIFVSYSTFPGFVSWRDPKSGSWYVETLDDIFEQWAHSEDLQSLLLRVANAVSVKGIYKQMPGCWNFLRKKLFFKTSASRA

SEQ ID NO: 104 - DNA, 864 bp, synthetic construct
  misc_feature 1..864: note = Description of Artificial Sequence: Synthetic polynucleotide
  source 1..864: mol_type = other DNA
gtcgacggatttggtgatgtcggtgctcttgagagtttgaggggaaatgcagatttggcttacatcctgagcatggagccctgtggccactgcctcattatcaacaatgtgaacttctgccgtgagtccgggctccgcacccgcactggctccaacatcgactgtgagaagttgcggcgtcgcttctcctcgctgcatttcatggtggaggtgaagggcgacctgactgccaagaaaatggtgctggctttgctggagctggcgcggcaggaccacggtgctctggactgctgcgtggtggtcattctctctcacggctgtcaggccagccacctgcagttcccaggggctgtctacggcacagatggatgccctgtgtcggtcgagaagattgtgaacatcttcaatgggaccagctgccccagcctgggagggaagcccaagctctttttcatccaggcctgtggtggggagcagaaagaccatgggtttgaggtggcctccacttcccctgaagacgagtcccctggcagtaaccccgagccagatgccaccccgttccaggaaggtttgaggaccttcgaccagctggacgccatatctagtttgcccacacccagtgacatctttgtgtcctactctactttcccaggttttgtttcctggagggaccccaagagtggctcctggtacgttgagaccctggacgacatctttgagcagtgggctcactctgaagacctgcagtccctcctgcttagggtcgctaatgctgtttcggtgaaagggatttataaacagatgcctggttgctttcagttcctccggaaaaaacttttctttaaaacatcagctagcagagcc

SEQ ID NO: 105 - protein, 288 aa, synthetic construct; identical to SEQ ID NO: 40
  REGION 1..288: note = Description of Artificial Sequence: Synthetic polypeptide

SEQ ID NO: 106 - DNA, 864 bp, synthetic construct; identical to SEQ ID NO: 39
  misc_feature 1..864: note = Description of Artificial Sequence: Synthetic polynucleotide
  source 1..864: mol_type = other DNA

SEQ ID NO: 107 - protein, 288 aa, synthetic construct; identical to SEQ ID NO: 40
  REGION 1..288: note = Description of Artificial Sequence: Synthetic polypeptide

SEQ ID NO: 108 - DNA, 864 bp, synthetic construct
  misc_feature 1..864: note = Description of Artificial Sequence: Synthetic polynucleotide
  source 1..864: mol_type = other DNA
gtcgacggatttggtgatgtcggtgctcttgagagtttgaggggaaatgcagatttggcttacatcctgagcatggagccctgtggccactgcctcattatcaacaatgtgaacttctgccgtgagtccgggctccgcacccgcactggctccaacatcgactgtgagaagttgcggcgtcgcttctcctcgctgcatttcatggtggaggtgaagggcgacctgactgccaagaaaatggtgctggctttgctggagctggcgcggcaggaccacggtgctctggactgctgcgtggtggtcattctctctcacggctgtcaggccagccacctgcagttcccaggggctgtctacggcacagatggatgccctgtgtcggtcgagaagattgtgaacatcttcaatgggaccagctgccccagcctgggagggaagcccaagctctttttcatccaggcctgtggtggggagcagaaagaccatgggtttgaggtggcctccacttcccctgaagacgagtcccctggcagtaaccccgagccagatgccaccccgttccaggaaggtttgaggaccttcgaccagctggacgccatatctagtttgcccacacccagtgacatctttgtgtcctactctactttcccaggttttgtttcctggagggaccccaagagtggctcctggtacgttgagaccctggacgacatctttgagcagtgggctcactctgaagacctgcagtccctcctgcttagggtcgctaatgctgtttcggtgaaagggatttataaacagatgcctggttgctttaatctcctccggaaaaaacttttctttaaaacatcagctagcagagcc

SEQ ID NO: 109 - protein, 288 aa, synthetic construct
  REGION 1..288: note = Description of Artificial Sequence: Synthetic polypeptide
VDGFGDVGALESLRGNADLAYILSMEPCGHCLIINNVNFCRESGLRTRTGSNIDCEKLRRRFSSLHFMVEVKGDLTAKKMVLALLELARQDHGALDCCVVVILSHGCQASHLQFPGAVYGTDGCPVSVEKIVNIFNGTSCPSLGGKPKLFFIQACGGEQKDHGFEVASTSPEDESPGSNPEPDATPFQEGLRTFDQLDAISSLPTPSDIFVSYSTFPGFVSWRDPKSGSWYVETLDDIFEQWAHSEDLQSLLLRVANAVSVKGIYKQMPGCFNLLRKKLFFKTSASRA

SEQ ID NO: 110 - DNA, 864 bp, synthetic construct
  misc_feature 1..864: note = Description of Artificial Sequence: Synthetic polynucleotide
  source 1..864: mol_type = other DNA
gtcgacggatttggtgatgtcggtgctcttgagagtttgaggggaaatgcagatttggcttacatcctgagcatggagccctgtggccactgcctcattatcaacaatgtgaacttctgccgtgagtccgggctccgcacccgcactggctccaacatcgactgtgagaagttgcggcgtcgcttctcctcgctgcatttcatggtggaggtgaagggcgacctgactgccaagaaaatggtgctggctttgctggagctggcgcggcaggaccacggtgctctggactgctgcgtggtggtcattctctctcacggctgtcaggccagccacctgcagttcccaggggctgtctacggcacagatggatgccctgtgtcggtcgagaagattgtgaacatcttcaatgggaccagctgccccagcctgggagggaagcccaagctctttttcatccaggcctgtggtggggagcagaaagaccatgggtttgaggtggcctccacttcccctgaagacgagtcccctggcagtaaccccgagccagatgccaccccgttccaggaaggtttgaggaccttcgaccagctggacgccatatctagtttgcccacacccagtgacatctttgtgtcctactctactttcccaggttttgtttcctggagggaccccaagagtggctcctggtacgttgagaccctggacgacatctttgagcagtgggctcactctgaagacctgcagtccctcctgcttagggtcgctaatgctgtttcggtgaaagggatttataaacagatgcctggttgctttaattccctccggaaaaaacttttctttaaaacatcagctagcagagcc

SEQ ID NO: 111 - protein, 288 aa, synthetic construct
  REGION 1..288: note = Description of Artificial Sequence: Synthetic polypeptide
VDGFGDVGALESLRGNADLAYILSMEPCGHCLIINNVNFCRESGLRTRTGSNIDCEKLRRRFSSLHFMVEVKGDLTAKKMVLALLELARQDHGALDCCVVVILSHGCQASHLQFPGAVYGTDGCPVSVEKIVNIFNGTSCPSLGGKPKLFFIQACGGEQKDHGFEVASTSPEDESPGSNPEPDATPFQEGLRTFDQLDAISSLPTPSDIFVSYSTFPGFVSWRDPKSGSWYVETLDDIFEQWAHSEDLQSLLLRVANAVSVKGIYKQMPGCFNTLRKKLFFKTSASRA

SEQ ID NO: 112 - DNA, 864 bp, synthetic construct
  misc_feature 1..864: note = Description of Artificial Sequence: Synthetic polynucleotide
  source 1..864: mol_type = other DNA
gtggacgggtttggagatgtgggagccctggaagccctgcggggcaatgccgatctggcttacatcctgtctatggagccttgcggccactgtctgatcattaacaatgtgaacttctgcagagagagcgggctgcggaccagaacaggatccaatattgactgtgaaaagctgcggagaaggttctctagtctgcactttatggtcgaggtgaaaggcgatctgaccgctaagaaaatggtgctggccctgctggaactggctcggcaggaccatggggcactggattgctgcgtggtcgtgatcctgagtcacggctgccaggcttcacatctgcagttccctggggcagtctatggaactgacggctgtccagtcagcgtggagaagatcgtgaacatcttcaacggcacctcttgcccaagtctgggcgggaagcccaaactgttctttattcaggcctgtggaggcgagcagaaagatcacggcttcgaagtggctagcacctcccccgaggacgaatcacctggaagcaaccctgagccagatgcaacccccttccaggaaggcctgaggacatttgaccagctggatgccatctcaagcctgcccacaccttctgacattttcgtctcttacagtactttccctggatttgtgagctggcgcgatccaaagtcaggcagctggtacgtggagacactggacgatatctttgagcagtgggcccattctgaagacctgcagagtctgctgctgcgagtggccaatgctgtctctgtgaaggggatctacaaacagatgccaggatgcttccagtttctgagaaagaaactgttctttaagacctccgcatctagggcc

SEQ ID NO: 113 - protein, 288 aa, synthetic construct
  REGION 1..288: note = Description of Artificial Sequence: Synthetic polypeptide
VDGFGDVGALEALRGNADLAYILSMEPCGHCLIINNVNFCRESGLRTRTGSNIDCEKLRRRFSSLHFMVEVKGDLTAKKMVLALLELARQDHGALDCCVVVILSHGCQASHLQFPGAVYGTDGCPVSVEKIVNIFNGTSCPSLGGKPKLFFIQACGGEQKDHGFEVASTSPEDESPGSNPEPDATPFQEGLRTFDQLDAISSLPTPSDIFVSYSTFPGFVSWRDPKSGSWYVETLDDIFEQWAHSEDLQSLLLRVANAVSVKGIYKQMPGCFQFLRKKLFFKTSASRA

SEQ ID NO: 114 - DNA, 864 bp, synthetic construct
  misc_feature 1..864: note = Description of Artificial Sequence: Synthetic polynucleotide
  source 1..864: mol_type = other DNA
gtcgacggatttggtgatgtcggtgctcttgaggctttgaggggaaatgcagatttggcttacatcctgagcatggagccctgtggccactgcctcattatcaacaatgtgaacttctgccgtgagtccgggctccgcacccgcactggctccaacatcgactgtgagaagttgcggcgtcgcttctcctcgctgcatttcatggtggaggtgaagggcgacctgactgccaagaaaatggtgctggctttgctggagctggcgcggcaggaccacggtgctctggactgctgcgtggtggtcattctctctcacggctgtcaggccagccacctgcagttcccaggggctgtctacggcacagatggatgccctgtgtcggtcgagaagattgtgaacatcttcaatgggaccagctgccccagcctgggagggaagcccaagctctttttcatccaggcctgtggtggggagcagaaagaccatgggtttgaggtggcctccacttcccctgaagacgagtcccctggcagtaaccccgagccagatgccaccccgttccaggaaggtttgaggaccttcgaccagctggccgccatatctagtttgcccacacccagtgacatctttgtgtcctactctactttcccaggttttgtttcctggagggaccccaagagtggctcctggtacgttgagaccctggacgacatctttgagcagtgggctcactctgaagacctgcagtccctcctgcttagggtcgctaatgctgtttcggtgaaagggatttataaacagatgcctggttgctttaatttcctccggaaaaaacttttctttaaaacatcagctagcagagcc

SEQ ID NO: 115 - protein, 288 aa, synthetic construct
  REGION 1..288: note = Description of Artificial Sequence: Synthetic polypeptide
VDGFGDVGALEALRGNADLAYILSMEPCGHCLIINNVNFCRESGLRTRTGSNIDCEKLRRRFSSLHFMVEVKGDLTAKKMVLALLELARQDHGALDCCVVVILSHGCQASHLQFPGAVYGTDGCPVSVEKIVNIFNGTSCPSLGGKPKLFFIQACGGEQKDHGFEVASTSPEDESPGSNPEPDATPFQEGLRTFDQLAAISSLPTPSDIFVSYSTFPGFVSWRDPKSGSWYVETLDDIFEQWAHSEDLQSLLLRVANAVSVKGIYKQMPGCFNFLRKKLFFKTSASRA

SEQ ID NO: 116 - DNA, 864 bp, synthetic construct
  misc_feature 1..864: note = Description of Artificial Sequence: Synthetic polynucleotide
  source 1..864: mol_type = other DNA
gtcgacggatttggtgatgtcggtgctcttgaggacttgaggggaaatgcagatttggcttacatcctgagcatggagccctgtggccactgcctcattatcaacaatgtgaacttctgccgtgagtccgggctccgcacccgcactggctccaacatcgactgtgagaagttgcggcgtcgcttctcctcgctgcatttcatggtggaggtgaagggcgacctgactgccaagaaaatggtgctggctttgctggagctggcgcggcaggaccacggtgctctggactgctgcgtggtggtcattctctctcacggctgtcaggccagccacctgcagttcccaggggctgtctacggcacagatggatgccctgtgtcggtcgagaagattgtgaacatcttcaatgggaccagctgccccagcctgggagggaagcccaagctctttttcatccaggcctgtggtggggagcagaaagaccatgggtttgaggtggcctccacttcccctgaagacgagtcccctggcagtaaccccgagccagatgccaccccgttccaggaaggtttgaggaccttcgaccagctggccgccatatctagtttgcccacacccagtgacatctttgtgtcctactctactttcccaggttttgtttcctggagggaccccaagagtggctcctggtacgttgagaccctggacgacatctttgagcagtgggctcactctgaagacctgcagtccctcctgcttagggtcgctaatgctgtttcggtgaaagggatttataaacagatgcctggttgctttaatttcctccggaaaaaacttttctttaaaacatcagctagcagagcc

SEQ ID NO: 117 - protein, 288 aa, synthetic construct
  REGION 1..288: note = Description of Artificial Sequence: Synthetic polypeptide
VDGFGDVGALEDLRGNADLAYILSMEPCGHCLIINNVNFCRESGLRTRTGSNIDCEKLRRRFSSLHFMVEVKGDLTAKKMVLALLELARQDHGALDCCVVVILSHGCQASHLQFPGAVYGTDGCPVSVEKIVNIFNGTSCPSLGGKPKLFFIQACGGEQKDHGFEVASTSPEDESPGSNPEPDATPFQEGLRTFDQLAAISSLPTPSDIFVSYSTFPGFVSWRDPKSGSWYVETLDDIFEQWAHSEDLQSLLLRVANAVSVKGIYKQMPGCFNFLRKKLFFKTSASRA

SEQ ID NO: 118 - DNA, 864 bp, synthetic construct
  misc_feature 1..864: note = Description of Artificial Sequence: Synthetic polynucleotide
  source 1..864: mol_type = other DNA
gtcgacggatttggtgatgtcggtgctcttgagagtttgaggggaaatgcagatttggcttacatcctgagcatggagccctgtggccactgcctcattatcaacaatgtgaacttctgccgtgagtccgggctccgcacccgcactggctccaacatcgactgtgagaagttgcggcgtcgcttctccgcgctgcatttcatggtggaggtgaagggcgacctgactgccaagaaaatggtgctggctttgctggagctggcgcggcaggaccacggtgctctggactgctgcgtggtggtcattctctctcacggctgtcaggccagccacctgcagttcccaggggctgtctacggcacagatggatgccctgtgtcggtcgagaagattgtgaacatcttcaatgggaccagctgccccagcctgggagggaagcccaagctctttttcatccaggcctgtggtggggagcagaaagaccatgggtttgaggtggcctccacttcccctgaagacgagtcccctggcagtaaccccgagccagatgccaccccgttccaggaaggtttgaggaccttcgaccagctggccgccatatctagtttgcccacacccagtgacatctttgtgtcctactctactttcccaggttttgtttcctggagggaccccaagagtggctcctggtacgttgagaccctggacgacatctttgagcagtgggctcactctgaagacctgcagtccctcctgcttagggtcgctaatgctgtttcggtgaaagggatttataaacagatgcctggttgctttaatttcctccggaaaaaacttttctttaaaacatcagctagcagagcc

SEQ ID NO: 119 - protein, 288 aa, synthetic construct
  REGION 1..288: note = Description of Artificial Sequence: Synthetic polypeptide
VDGFGDVGALESLRGNADLAYILSMEPCGHCLIINNVNFCRESGLRTRTGSNIDCEKLRRRFSALHFMVEVKGDLTAKKMVLALLELARQDHGALDCCVVVILSHGCQASHLQFPGAVYGTDGCPVSVEKIVNIFNGTSCPSLGGKPKLFFIQACGGEQKDHGFEVASTSPEDESPGSNPEPDATPFQEGLRTFDQLAAISSLPTPSDIFVSYSTFPGFVSWRDPKSGSWYVETLDDIFEQWAHSEDLQSLLLRVANAVSVKGIYKQMPGCFNFLRKKLFFKTSASRA

SEQ ID NO: 120 - DNA, 864 bp, synthetic construct
  misc_feature 1..864: note = Description of Artificial Sequence: Synthetic polynucleotide
  source 1..864: mol_type = other DNA
gtcgacggatttggtgatgtcggtgctcttgagagtttgaggggaaatgcagatttggcttacatcctgagcatggagccctgtggccactgcctcattatcaacaatgtgaacttctgccgtgagtccgggctccgcacccgcactggctccaacatcgactgtgagaagttgcggcgtcgcttctccgacctgcatttcatggtggaggtgaagggcgacctgactgccaagaaaatggtgctggctttgctggagctggcgcggcaggaccacggtgctctggactgctgcgtggtggtcattctctctcacggctgtcaggccagccacctgcagttcccaggggctgtctacggcacagatggatgccctgtgtcggtcgagaagattgtgaacatcttcaatgggaccagctgccccagcctgggagggaagcccaagctctttttcatccaggcctgtggtggggagcagaaagaccatgggtttgaggtggcctccacttcccctgaagacgagtcccctggcagtaaccccgagccagatgccaccccgttccaggaaggtttgaggaccttcgaccagctggccgccatatctagtttgcccacacccagtgacatctttgtgtcctactctactttcccaggttttgtttcctggagggaccccaagagtggctcctggtacgttgagaccctggacgacatctttgagcagtgggctcactctgaagacctgcagtccctcctgcttagggtcgctaatgctgtttcggtgaaagggatttataaacagatgcctggttgctttaatttcctccggaaaaaacttttctttaaaacatcagctagcagagcc

SEQ ID NO: 121 - protein, 288 aa, synthetic construct
  REGION 1..288: note = Description of Artificial Sequence: Synthetic polypeptide
VDGFGDVGALESLRGNADLAYILSMEPCGHCLIINNVNFCRESGLRTRTGSNIDCEKLRRRFSDLHFMVEVKGDLTAKKMVLALLELARQDHGALDCCVVVILSHGCQASHLQFPGAVYGTDGCPVSVEKIVNIFNGTSCPSLGGKPKLFFIQACGGEQKDHGFEVASTSPEDESPGSNPEPDATPFQEGLRTFDQLAAISSLPTPSDIFVSYSTFPGFVSWRDPKSGSWYVETLDDIFEQWAHSEDLQSLLLRVANAVSVKGIYKQMPGCFNFLRKKLFFKTSASRA

SEQ ID NO: 122 - DNA, 864 bp, synthetic construct
  misc_feature 1..864: note = Description of Artificial Sequence: Synthetic polynucleotide
  source 1..864: mol_type = other DNA
gtggacgggtttggagatgtgggagccctggaatccctgcggggcaatgccgatctggcttacatcctgtctatggagccttgcggccactgtctgatcattaacaatgtgaacttctgcagagagagcgggctgcggaccagaacaggatccaatattgactgtgaaaagctgcggagaaggttctctagtctgcactttatggtcgaggtgaaaggcgatctgaccgctaagaaaatggtgctggccctgctggaactggctcggcaggaccatggggcactggattgctgcgtggtcgtgatcctgagtcacggctgccaggcttcacatctgcagttccctggggcagtctatggaactgacggctgtccagtcagcgtggagaagatcgtgaacatcttcaacggcacctcttgcccaagtctgggcgggaagcccaaactgttctttattcaggcctgtggaggcgagcagaaagatcacggcttcgaagtggctagcacctcccccgaggacgaatcacctggaagcaaccctgagccagatgcaagccccttccaggaaggcctgaggacatttgaccagctggatgccatctcaagcctgcccacaccttctgacattttcgtctcttacagtactttccctggatttgtgagctggcgcgatccaaagtcaggcagctggtacgtggagacactggacgatatctttgagcagtgggcccattctgaagacctgcagagtctgctgctgcgagtggccaatgctgtctctgtgaaggggatctacaaacagatgccaggatgcttccagtttctgagaaagaaactgttctttaagacctccgcatctagggcc

SEQ ID NO: 123 - protein, 288 aa, synthetic construct
  REGION 1..288: note = Description of Artificial Sequence: Synthetic polypeptide
VDGFGDVGALESLRGNADLAYILSMEPCGHCLIINNVNFCRESGLRTRTGSNIDCEKLRRRFSSLHFMVEVKGDLTAKKMVLALLELARQDHGALDCCVVVILSHGCQASHLQFPGAVYGTDGCPVSVEKIVNIFNGTSCPSLGGKPKLFFIQACGGEQKDHGFEVASTSPEDESPGSNPEPDASPFQEGLRTFDQLDAISSLPTPSDIFVSYSTFPGFVSWRDPKSGSWYVETLDDIFEQWAHSEDLQSLLLRVANAVSVKGIYKQMPGCFQFLRKKLFFKTSASRA

SEQ ID NO: 124 - DNA, 864 bp, synthetic construct
  misc_feature 1..864: note = Description of Artificial Sequence: Synthetic polynucleotide
  source 1..864: mol_type = other DNA
gtcgacggatttggtgatgtcggtgctcttgagagtttgaggggaaatgcagatttggcttacatcctgagcatggagccctgtggccactgcctcattatcaacaatgtgaacttctgccgtgagtccgggctccgcacccgcactggctccaacatcgactgtgagaagttgcggcgtcgcttctcctcgctgcatttcatggtggaggtgaagggcgacctgactgccaagaaaatggtgctggctttgctggagctggcgcggcaggaccacggtgctctggactgctgcgtggtggtcattctctctcacggctgtcaggccagccacctgcagttcccaggggctgtctacggcacagatggatgccctgtgtcggtcgagaagattgtgaacatcttcaatgggaccagctgccccagcctgggagggaagcccaagctctttttcatccaggcctgtggtggggagcagaaagaccatgggtttgaggtggcctccacttcccctgaagacgagtcccctggcagtaaccccgagccagatgccaccccgttccaggaaggtttgaggaccttcgaccagctggccgccatatctagtttgcccacacccagtgacatctttgtgtcctactctactttcccaggttttgtttcctggagggaccccaagagtggctcctggtacgttgagaccctggacgacatctttgagcagtgggctcactctgaagacctgcagtccctcctgcttagggtcgctaatgctgtttcggtgaaagggatttataaacagatgcctggttgcttcagtttcctccggaaaaaacttttctttaaaacatcagctagcagagcc

SEQ ID NO: 125 - protein, 288 aa, synthetic construct
  REGION 1..288: note = Description of Artificial Sequence: Synthetic polypeptide
VDGFGDVGALESLRGNADLAYILSMEPCGHCLIINNVNFCRESGLRTRTGSNIDCEKLRRRFSSLHFMVEVKGDLTAKKMVLALLELARQDHGALDCCVVVILSHGCQASHLQFPGAVYGTDGCPVSVEKIVNIFNGTSCPSLGGKPKLFFIQACGGEQKDHGFEVASTSPEDESPGSNPEPDATPFQEGLRTFDQLAAISSLPTPSDIFVSYSTFPGFVSWRDPKSGSWYVETLDDIFEQWAHSEDLQSLLLRVANAVSVKGIYKQMPGCFQFLRKKLFFKTSASRA

SEQ ID NO: 126 - DNA, 864 bp, synthetic construct
  misc_feature 1..864: note = Description of Artificial Sequence: Synthetic polynucleotide
  source 1..864: mol_type = other DNA
gtcgacggatttggtgatgtcggtgctcttgagagtttgaggggaaatgcagatttggcttacatcctgagcatggagccctgtggccactgcctcattatcaacaatgtgaacttctgccgtgagtccgggctccgcacccgcactggctccaacatcgactgtgagaagttgcggcgtcgcttctcctcgctgcatttcatggtggaggtgaagggcgacctgactgccaagaaaatggtgctggctttgctggagctggcgcggcaggaccacggtgctctggactgctgcgtggtggtcattctctctcacggctgtcaggccagccacctgcagttcccaggggctgtctacggcacagatggatgccctgtgtcggtcgagaagattgtgaacatcttcaatgggaccagctgccccagcctgggagggaagcccaagctctttttcatccaggcctgtggtggggagcagaaagaccatgggtttgaggtggcctccacttcccctgaagacgagtcccctggcagtaaccccgagccagatgccgtgcccatccaggaaggtttgaggaccttcgaccagctggacgccatatctagtttgcccacacccagtgacatctttgtgtcctactctactttcccaggttttgtttcctggagggaccccaagagtggctcctggtacgttgagaccctggacgacatctttgagcagtgggctcactctgaagacctgcagtccctcctgcttagggtcgctaatgctgtttcggtgaaagggatttataaacagatgcctggttgctttaatttcctccggaaaaaacttttctttaaaacatcagctagcagagcc

SEQ ID NO: 127 - protein, 288 aa, synthetic construct
  REGION 1..288: note = Description of Artificial Sequence: Synthetic polypeptide
VDGFGDVGALESLRGNADLAYILSMEPCGHCLIINNVNFCRESGLRTRTGSNIDCEKLRRRFSSLHFMVEVKGDLTAKKMVLALLELARQDHGALDCCVVVILSHGCQASHLQFPGAVYGTDGCPVSVEKIVNIFNGTSCPSLGGKPKLFFIQACGGEQKDHGFEVASTSPEDESPGSNPEPDAVPIQEGLRTFDQLDAISSLPTPSDIFVSYSTFPGFVSWRDPKSGSWYVETLDDIFEQWAHSEDLQSLLLRVANAVSVKGIYKQMPGCFNFLRKKLFFKTSASRA

SEQ ID NO: 128 - DNA, 864 bp, synthetic construct
  misc_feature 1..864: note = Description of Artificial Sequence: Synthetic polynucleotide
  source 1..864: mol_type = other DNA
gtcgacggatttggtgatgtcggtgctcttgagagtttgaggggaaatgcagatttggcttacatcctgagcatggagccctgtggccactgcctcattatcaacaatgtgaacttctgccgtgagtccgggctccgcacccgcactggctccaacatcgactgtgagaagttgcggcgtcgcttctcctcgctgcatttcatggtggaggtgaagggcgacctgactgccaagaaaatggtgctggctttgctggagctggcgcggcaggaccacggtgctctggactgctgcgtggtggtcattctctctcacggctgtcaggccagccacctgcagttcccaggggctgtctacggcacagatggatgccctgtgtcggtcgagaagattgtgaacatcttcaatgggaccagctgccccagcctgggagggaagcccaagctctttttcatccaggcctgtggtggggagcagaaagaccatgggtttgaggtggcctccacttcccctgaagacgagtcccctggcagtaaccccgagccagatgccaccccgttccaggaaggtttgaggaccttcgaccagctggacgccatatctagtttgcccacacccagtgacatctttgtgtcctactctactttcccaggttttgtttcctggagggaccccaagagtggctcctggtacgttgagaccctggacgacatctttgagcagtgggctcactctgaagacctgcagtccctcctgcttagggtcgctaatgctgtttcggtgaaagggatttataaacagatgccgatatccgcacagacactccggaaaaaacttttctttaaaacatcagctagcagagcc

SEQ ID NO: 129 - protein, 288 aa, synthetic construct
  REGION 1..288: note = Description of Artificial Sequence: Synthetic polypeptide
VDGFGDVGALESLRGNADLAYILSMEPCGHCLIINNVNFCRESGLRTRTGSNIDCEKLRRRFSSLHFMVEVKGDLTAKKMVLALLELARQDHGALDCCVVVILSHGCQASHLQFPGAVYGTDGCPVSVEKIVNIFNGTSCPSLGGKPKLFFIQACGGEQKDHGFEVASTSPEDESPGSNPEPDATPFQEGLRTFDQLDAISSLPTPSDIFVSYSTFPGFVSWRDPKSGSWYVETLDDIFEQWAHSEDLQSLLLRVANAVSVKGIYKQMPISAQTLRKKLFFKTSASRA

SEQ ID NO: 130 - DNA, 330 bp, synthetic construct; identical to SEQ ID NO: 35
  misc_feature 1..330: note = Description of Artificial Sequence: Synthetic polynucleotide
  source 1..330: mol_type = other DNA

SEQ ID NO: 131 - protein, 110 aa, synthetic construct; identical to SEQ ID NO: 36
  REGION 1..110: note = Description of Artificial Sequence: Synthetic polypeptide

SEQ ID NO: 132 - DNA, 18 bp, synthetic construct
  misc_feature 1..18: note = Description of Artificial Sequence: Synthetic oligonucleotide
  source 1..18: mol_type = other DNA
agcggaggaggatccgga

SEQ ID NO: 133 - protein, 6 aa, synthetic construct
  REGION 1..6: note = Description of Artificial Sequence: Synthetic peptide
SGGGSG

SEQ ID NO: 134 - DNA, 864 bp, synthetic construct; identical to SEQ ID NO: 46
  misc_feature 1..864: note = Description of Artificial Sequence: Synthetic polynucleotide
  source 1..864: mol_type = other DNA

SEQ ID NO: 135 - protein, 288 aa, synthetic construct; identical to SEQ ID NO: 45
  REGION 1..288: note = Description of Artificial Sequence: Synthetic polypeptide

SEQ ID NO: 136-137 - skipped (2 entries)

SEQ ID NO: 138 - DNA, 54 bp, synthetic construct
  misc_feature 1..54: note = Description of Artificial Sequence: Synthetic oligonucleotide
  source 1..54: mol_type = other DNA
gaaggccgagggagcctgctgacatgtggcgatgtggaggaaaacccaggacca

SEQ ID NO: 139 - protein, 18 aa, synthetic construct
  REGION 1..18: note = Description of Artificial Sequence: Synthetic peptide
EGRGSLLTCGDVEENPGP

SEQ ID NO: 140-141 - skipped (2 entries)

SEQ ID NO: 142 - DNA, 63 bp, synthetic construct
  misc_feature 1..63: note = Description of Artificial Sequence: Synthetic oligonucleotide
  source 1..63: mol_type = other DNA
atggagtttggactttcttggttgtttttggtggcaattctgaagggtgtccagtgtagcagg

SEQ ID NO: 143 - protein, 21 aa, synthetic construct
  REGION 1..21: note = Description of Artificial Sequence: Synthetic peptide
MEFGLSWLFLVAILKGVQCSR

SEQ ID NO: 144 - DNA, 321 bp, synthetic construct
  misc_feature 1..321: note = Description of Artificial Sequence: Synthetic polynucleotide
  source 1..321: mol_type = other DNA
gacatccagatgacacagactacatcctccctgtctgcctctctgggagacagagtcaccatcagttgcagggcaagtcaggacattagtaaatatttaaattggtatcagcagaaaccagatggaactgttaaactcctgatctaccatacatcaagattacactcaggagtcccatcaaggttcagtggcagtgggtctggaacagattattctctcaccattagcaacctggagcaagaagatattgccacttacttttgccaacagggtaatacgcttccgtacacgttcggaggggggactaagttggaaataaca

SEQ ID NO: 145 - protein, 107 aa, synthetic construct
  REGION 1..107: note = Description of Artificial Sequence: Synthetic polypeptide
DIQMTQTTSSLSASLGDRVTISCRASQDISKYLNWYQQKPDGTVKLLIYHTSRLHSGVPSRFSGSGSGTDYSLTISNLEQEDIATYFCQQGNTLPYTFGGGTKLEIT

SEQ ID NO: 146 - DNA, 24 bp, synthetic construct
  misc_feature 1..24: note = Description of Artificial Sequence: Synthetic oligonucleotide
  source 1..24: mol_type = other DNA
ggcggaggaagcggaggtgggggc

SEQ ID NO: 147 - protein, 8 aa, synthetic construct
  REGION 1..8: note = Description of Artificial Sequence: Synthetic peptide
GGGSGGGG

SEQ ID NO: 148 - DNA, 360 bp, synthetic construct
  misc_feature 1..360: note = Description of Artificial Sequence: Synthetic polynucleotide
  source 1..360: mol_type = other DNA
gaggtgaaactgcaggagtcaggacctggcctggtggcgccctcacagagcctgtccgtcacatgcactgtctcaggggtctcattacccgactatggtgtaagctggattcgccagcctccacgaaagggtctggagtggctgggagtaatatggggtagtgaaaccacatactataattcagctctcaaatccagactgaccatcatcaaggacaactccaagagccaagttttcttaaaaatgaacagtctgcaaactgatgacacagccatttactactgtgccaaacattattactacggtggtagctatgctatggactactggggtcaaggaacctcagtcaccgtctcctca

SEQ ID NO: 149 - protein, 120 aa, synthetic construct
  REGION 1..120: note = Description of Artificial Sequence: Synthetic polypeptide
EVKLQESGPGLVAPSQSLSVTCTVSGVSLPDYGVSWIRQPPRKGLEWLGVIWGSETTYYNSALKSRLTIIKDNSKSQVFLKMNSLQTDDTAIYYCAKHYYYGGSYAMDYWGQGTSVTVSS

SEQ ID NO: 150-151 - skipped (2 entries)

SEQ ID NO: 152 - DNA, 48 bp, synthetic construct
  misc_feature 1..48: note = Description of Artificial Sequence: Synthetic oligonucleotide
  source 1..48: mol_type = other DNA
gaacttcctactcaggggactttctcaaacgttagcacaaacgtaagt

SEQ ID NO: 153 - protein, 16 aa, synthetic construct
  REGION 1..16: note = Description of Artificial Sequence: Synthetic peptide
ELPTQGTFSNVSTNVS

SEQ ID NO: 154 - DNA, 126 bp, synthetic construct
  misc_feature 1..126: note = Description of Artificial Sequence: Synthetic polynucleotide
  source 1..126: mol_type = other DNA
cccgccccaagaccccccacacctgcgccgaccattgcttctcaacccctgagtttgagacccgaggcctgccggccagctgccggcggggccgtgcatacaagaggactcgatttcgcttgcgac

SEQ ID NO: 155 - protein, 42 aa, synthetic construct
  REGION 1..42: note = Description of Artificial Sequence: Synthetic polypeptide
PAPRPPTPAPTIASQPLSLRPEACRPAAGGAVHTRGLDFACD

SEQ ID NO: 156 - DNA, 111 bp, synthetic construct
  misc_feature 1..111: note = Description of Artificial Sequence: Synthetic polynucleotide
  source 1..111: mol_type = other DNA
atctatatctgggcacctctcgctggcacctgtggagtccttctgctcagcctggttattactctgtactgtaatcaccggaatcgccgccgcgtttgtaagtgtcccagg

SEQ ID NO: 157 - protein, 37 aa, synthetic construct
  REGION 1..37: note = Description of Artificial Sequence: Synthetic polypeptide
IYIWAPLAGTCGVLLLSLVITLYCNHRNRRRVCKCPR

SEQ ID NO: 158-159 - skipped (2 entries)

SEQ ID NO: 160 - DNA, 336 bp, synthetic construct
  misc_feature 1..336: note = Description of Artificial Sequence: Synthetic polynucleotide
  source 1..336: mol_type = other DNA
agagtgaagttcagcaggagcgcagacgcccccgcgtaccagcagggccagaaccagctctataacgagctcaatctaggacgaagagaggagtacgatgttttggacaagagacgtggccgggaccctgagatggggggaaagccgagaaggaagaaccctcaggaaggcctgtacaatgaactgcagaaagataagatggcggaggcctacagtgagattgggatgaaaggcgagcgccggaggggcaaggggcacgatggcctttaccagggtctcagtacagccaccaaggacacctacgacgcccttcacatgcaggccctgccccctcgc

SEQ ID NO: 161 - protein, 112 aa, synthetic construct
  REGION 1..112: note = Description of Artificial Sequence: Synthetic polypeptide
RVKFSRSADAPAYQQGQNQLYNELNLGRREEYDVLDKRRGRDPEMGGKPRRKNPQEGLYNELQKDKMAEAYSEIGMKGERRRGKGHDGLYQGLSTATKDTYDALHMQALPPR

SEQ ID NO: 162 - DNA, 63 bp, synthetic construct; identical to SEQ ID NO: 142
  misc_feature 1..63: note = Description of Artificial Sequence: Synthetic oligonucleotide
  source 1..63: mol_type = other DNA

SEQ ID NO: 163 - protein, 21 aa, synthetic construct
  REGION 1..21: note = Description of Artificial Sequence: Synthetic peptide
MEFGLSWLFLVAILKGVQCSR

SEQ ID NO: 164 - DNA, 327 bp, synthetic construct
  misc_feature 1..327: note = Description of Artificial Sequence: Synthetic polynucleotide
  source 1..327: mol_type = other DNA
gacatccaattgacacaatcacacaaatttctctcaacttctgtaggagacagagtgagcataacctgcaaagcatcccaggacgtgtacaatgctgtggcttggtaccaacagaagcctggacaatccccaaaattgctgatttattctgcctctagtaggtacactggggtaccttctcggtttacgggctctgggtccggaccagatttcacgttcacaatcagttccgttcaagctgaagacctcgctgtttatttttgccagcagcacttccgaaccccttttacttttggctcaggcactaagttggaaatcaaggctttg

SEQ ID NO: 165 - protein, 109 aa, synthetic construct
  REGION 1..109: note = Description of Artificial Sequence: Synthetic polypeptide
DIQLTQSHKFLSTSVGDRVSITCKASQDVYNAVAWYQQKPGQSPKLLIYSASSRYTGVPSRFTGSGSGPDFTFTISSVQAEDLAVYFCQQHFRTPFTFGSGTKLEIKAL

SEQ ID NO: 166 - DNA, 24 bp, synthetic construct
  misc_feature 1..24: note = Description of Artificial Sequence: Synthetic oligonucleotide
  source 1..24: mol_type = other DNA
ggcggaggaagcggaggtgggggc

SEQ ID NO: 167 - protein, 8 aa, synthetic construct
  REGION 1..8: note = Description of Artificial Sequence: Synthetic peptide
GGGSGGGG

SEQ ID NO: 168 - DNA, 357 bp, synthetic construct
  misc_feature 1..357: note = Description of Artificial Sequence: Synthetic polynucleotide
  source 1..357: mol_type = other DNA
gaagtccaattgcaacagtcaggccccgaattgaaaaagcccggcgaaacagtgaagatatcttgtaaagcctccggttacccttttacgaactatggaatgaactgggtcaaacaagcccctggacagggattgaagtggatgggatggatcaatacatcaacaggcgagtctaccttcgcagatgatttcaaaggtcgctttgacttctcactggagaccagtgcaaataccgcctaccttcagattaacaatcttaaaagcgaggatatggcaacctacttttgcgcaagatgggaagtttatcacgggtacgtgccatactggggacaaggaacgacagtgacagttagtagc

SEQ ID NO: 169 - protein, 119 aa, synthetic construct
  REGION 1..119: note = Description of Artificial Sequence: Synthetic polypeptide
EVQLQQSGPELKKPGETVKISCKASGYPFTNYGMNWVKQAPGQGLKWMGWINTSTGESTFADDFKGRFDFSLETSANTAYLQINNLKSEDMATYFCARWEVYHGYVPYWGQGTTVTVSS

SEQ ID NO: 170-171 - skipped (2 entries)

SEQ ID NO: 172 - DNA, 48 bp, synthetic construct; identical to SEQ ID NO: 152
  misc_feature 1..48: note = Description of Artificial Sequence: Synthetic oligonucleotide
  source 1..48: mol_type = other DNA

SEQ ID NO: 173 - protein, 16 aa, synthetic construct
  REGION 1..16: note = Description of Artificial Sequence: Synthetic peptide
ELPTQGTFSNVSTNVS

SEQ ID NO: 174 - DNA, 126 bp, synthetic construct; identical to SEQ ID NO: 154
  misc_feature 1..126: note = Description of Artificial Sequence: Synthetic polynucleotide
  source 1..126: mol_type = other DNA

SEQ ID NO: 175 - protein, 42 aa, synthetic construct; identical to SEQ ID NO: 155
  REGION 1..42: note = Description of Artificial Sequence: Synthetic polypeptide

SEQ ID NO: 176 - DNA, 111 bp, synthetic construct; identical to SEQ ID NO: 156
  misc_feature 1..111: note = Description of Artificial Sequence: Synthetic polynucleotide
  source 1..111: mol_type = other DNA

SEQ ID NO: 177 - protein, 37 aa, synthetic construct; identical to SEQ ID NO: 157
  REGION 1..37: note = Description of Artificial Sequence: Synthetic polypeptide

SEQ ID NO: 178-179 - skipped (2 entries)

SEQ ID NO: 180 - DNA, 336 bp, synthetic construct; identical to SEQ ID NO: 160
  misc_feature 1..336: note = Description of Artificial Sequence: Synthetic polynucleotide
  source 1..336: mol_type = other DNA

SEQ ID NO: 181 - protein, 112 aa, synthetic construct; identical to SEQ ID NO: 161
  REGION 1..112: note = Description of Artificial Sequence: Synthetic polypeptide

SEQ ID NO: 182 - DNA, 204 bp, synthetic construct
  misc_feature 1..204: note = Description of Artificial Sequence: Synthetic polynucleotide
  source 1..204: mol_type = other DNA
ttctgggtactggttgtagtcggtggcgtacttgcttgttattctcttcttgttaccgtagccttcattatattctgggtccgatcaaagcgctcaagactcctccattccgattatatgaacatgacacctcgccgacctggtcctacacgcaaacattatcaaccctacgcacccccccgagacttcgctgcttatcgatcc

SEQ ID NO: 183 - protein, 68 aa, synthetic construct
  REGION 1..68: note = Description of Artificial Sequence: Synthetic polypeptide
FWVLVVVGGVLACYSLLVTVAFIIFWVRSKRSRLLHSDYMNMTPRRPGPTRKHYQPYAPPRDFAAYRS

SEQ ID NO: 184 - DNA, 186 bp, synthetic construct
  misc_feature 1..186: note = Description of Artificial Sequence: Synthetic polynucleotide
  source 1..186: mol_type = other DNA
gttgccgccatcctgggcctgggcctggtgctggggctgctgggccccctggccatcctgctggccctgtacctgctccgggaccagaggctgccccccgatgcccacaagccccctgggggaggcagtttccggacccccatccaagaggagcaggccgacgcccactccaccctggccaagatc

SEQ ID NO: 185 - protein, 63 aa, synthetic construct
  REGION 1..63: note = Description of Artificial Sequence: Synthetic polypeptide
VAAILGLGLVLGLLGPLAILLALYLLRRDQRLPPDAHKPPGGGSFRTPIQEEQADAHSTLAKI

SEQ ID NO: 186 - DNA, 135 bp, synthetic construct
  misc_feature 1..135: note = Description of Artificial Sequence: Synthetic polynucleotide
  source 1..135: mol_type = other DNA
agtgtagttaaaagaggaagaaaaaagttgctgtatatatttaaacaaccatttatgagaccagtgcaaaccacccaagaagaagacggatgttcatgcagattcccagaagaagaagaaggaggatgtgaattg

SEQ ID NO: 187 - protein, 45 aa, synthetic construct
  REGION 1..45: note = Description of Artificial Sequence: Synthetic polypeptide
SVVKRGRKKLLYIFKQPFMRPVQTTQEEDGCSCRFPEEEEGGCEL

SEQ ID NO: 188 - protein, 288 aa, synthetic construct; identical to SEQ ID NO: 89
  REGION 1..288: note = Description of Artificial Sequence: Synthetic polypeptide

SEQ ID NO: 189 - DNA, 63 bp, synthetic construct; identical to SEQ ID NO: 142
  misc_feature 1..63: note = Description of Artificial Sequence: Synthetic oligonucleotide
  source 1..63: mol_type = other DNA

SEQ ID NO: 190 - protein, 21 aa, synthetic construct
  REGION 1..21: note = Description of Artificial Sequence: Synthetic peptide
MEFGLSWLFLVAILKGVQCSR

SEQ ID NO: 191 - DNA, 318 bp, synthetic construct
  misc_feature 1..318: note = Description of Artificial Sequence: Synthetic polynucleotide
  source 1..318: mol_type = other DNA
gacatccagctgacacaaagtcccagtagcctgtcagccagtgtcggcgatagggtgacaattacatgctccgcaagtagtagcgtcagattcatacactggtaccagcagaagcctgggaaggccccaaagaggcttatctacgataccagtaaactcgcctctggagttcctagccggttttctggatctggcagcggaactagctacaccctcacaatctccagtctgcaaccagaggactttgcaacctactactgccagcaatggagcagctcccctttcacctttgggcagggtactaaggtggagatcaag

SEQ ID NO: 192 - protein, 106 aa, synthetic construct
  REGION 1..106: note = Description of Artificial Sequence: Synthetic polypeptide
DIQLTQSPSSLSASVGDRVTITCSASSSVRFIHWYQQKPGKAPKRLIYDTSKLASGVPSRFSGSGSGTSYTLTISSLQPEDFATYYCQQWSSSPFTFGQGTKVEIK

SEQ ID NO: 193 - DNA, 24 bp, synthetic construct
  misc_feature 1..24: note = Description of Artificial Sequence: Synthetic oligonucleotide
  source 1..24: mol_type = other DNA
ggcggaggaagcggaggtgggggc

SEQ ID NO: 194 - protein, 8 aa, synthetic construct
  REGION 1..8: note = Description of Artificial Sequence: Synthetic peptide
GGGSGGGG

SEQ ID NO: 195 - DNA, 336 bp, synthetic construct
  misc_feature 1..336: note = Description of Artificial Sequence: Synthetic polynucleotide
  source 1..336: mol_type = other DNA
gaggtgcagcttgtagagagcgggggaggcctcgtacagccagggggctctctgcgcctgtcatgtgcagcttcaggattcaatataaaggactattacattcactgggtacggcaagctcccggtaagggcctggaatggatcggttggatcgaccctgaaaacggagatacagaatttgtgcccaagttccagggaaaggctaccatgtctgccgatacttctaagaatacagcataccttcagatgaattctctccgcgccgaggacacagccgtgtattattgtaaaacgggagggttctggggtcagggtacccttgtgactgtgtcttcc

SEQ ID NO: 196 - protein, 112 aa, synthetic construct
  REGION 1..112: note = Description of Artificial Sequence: Synthetic polypeptide
EVQLVESGGGLVQPGGSLRLSCAASGFNIKDYYIHWVRQAPGKGLEWIGWIDPENGDTEFVPKFQGKATMSADTSKNTAYLQMNSLRAEDTAVYYCKTGGFWGQGTLVTVSS

SEQ ID NO: 197 - DNA, 12 bp, synthetic construct
  misc_feature 1..12: note = Description of Artificial Sequence: Synthetic oligonucleotide
  source 1..12: mol_type = other DNA
ggggatcccgcc

SEQ ID NO: 198 - protein, 4 aa, synthetic construct
  REGION 1..4: note = Description of Artificial Sequence: Synthetic peptide
GDPA

SEQ ID NO: 199 - DNA, 36 bp, synthetic construct
  misc_feature 1..36: note = Description of Artificial Sequence: Synthetic oligonucleotide
  source 1..36: mol_type = other DNA
gagcccaaatctcctgacaaaactcacacatgccca

SEQ ID NO: 200 - protein, 12 aa, synthetic construct
  REGION 1..12: note = Description of Artificial Sequence: Synthetic peptide
EPKSPDKTHTCP

SEQ ID NO: 201 - DNA, 339 bp, synthetic construct
  misc_feature 1..339: note = Description of Artificial Sequence: Synthetic polynucleotide
  source 1..339: mol_type = other DNA
ccgtgcccagcacctgaactcctggggggaccgtcagtcttcctcttccccccaaaacccaaagacaccctcatgatctcccggacccctgaggtcacatgcgtggtggtggacgtgagccacgaagaccctgaggtcaagttcaactggtatgtggacggcgtggaggtgcataatgcaaagacaaagccgcgggaggagcagtacaacagcacgtaccgtgtggtcagcgtcctcaccgtcctgcaccaggactggctgaatggcaaggagtacaagtgcaaggtctccaacaaagccctcccagcccccatcgagaaaaccatctccaaagccaaa

SEQ ID NO: 202 - protein, 113 aa, synthetic construct
  REGION 1..113: note = Description of Artificial Sequence: Synthetic polypeptide
PCPAPELLGGPSVFLFPPKPKDTLMISRTPEVTCVVVDVSHEDPEVKFNWYVDGVEVHNAKTKPREEQYNSTYRVVSVLTVLHQDWLNGKEYKCKVSNKALPAPIEKTISKAK

SEQ ID NO: 203 - DNA, 321 bp, synthetic construct
  misc_feature 1..321: note = Description of Artificial Sequence: Synthetic polynucleotide
  source 1..321: mol_type = other DNA
gggcagccccgagaaccacaggtgtacaccctgcccccatcccgggatgagctgaccaagaaccaggtcagcctgacctgcctggtcaaaggcttctatcccagcgacatcgccgtggagtgggagagcaatgggcaaccggagaacaactacaagaccacgcctcccgtgctggactccgacggctccttcttcctctacagcaagctcaccgtggacaagagcaggtggcagcaggggaacgtcttctcatgctccgtgatgcatgaggctctgcacaaccactacacgcagaagagcctctccctgtctccgggtaaa

SEQ ID NO: 204 - protein, 107 aa, synthetic construct
  REGION 1..107: note = Description of Artificial Sequence: Synthetic polypeptide
GQPREPQVYTLPPSRDELTKNQVSLTCLVKGFYPSDIAVEWESNGQPENNYKTTPPVLDSDGSFFLYSKLTVDKSRWQQGNVFSCSVMHEALHNHYTQKSLSLSPGK

SEQ ID NO: 205 - DNA, 12 bp, synthetic construct
  misc_feature 1..12: note = Description of Artificial Sequence: Synthetic oligonucleotide
  source 1..12: mol_type = other DNA
aaagatcccaaa

SEQ ID NO: 206 - protein, 4 aa, synthetic construct
  REGION 1..4: note = Description of Artificial Sequence: Synthetic peptide
KDPK

SEQ ID NO: 207 - DNA, 72 bp, synthetic construct
  misc_feature 1..72: note = Description of Artificial Sequence: Synthetic oligonucleotide
  source 1..72: mol_type = other DNA
ttttgggtgctggtggtggttggtggagtcctggcttgctatagcttgctagtaacagtggcctttattatt

SEQ ID NO: 208 - protein, 24 aa, synthetic construct
  REGION 1..24: note = Description of Artificial Sequence: Synthetic peptide
FWVLVVVGGVLACYSLLVTVAFII

SEQ ID NO: 209-210 - skipped (2 entries)

SEQ ID NO: 211 - DNA, 336 bp, synthetic construct; identical to SEQ ID NO: 160
  misc_feature 1..336: note = Description of Artificial Sequence: Synthetic polynucleotide
  source 1..336: mol_type = other DNA

SEQ ID NO: 212 - protein, 112 aa, synthetic construct; identical to SEQ ID NO: 161
  REGION 1..112: note = Description of Artificial Sequence: Synthetic polypeptide

SEQ ID NO: 213 - DNA, 513 bp, synthetic construct
  misc_feature 1..513: note = Description of Artificial Sequence: Synthetic polynucleotide
  source 1..513: mol_type = other DNA
gccgctgggggcccaggcgccggatcagctgctcccgtatcttctacttcttctttgccgctggctgctctgaacatgcgcgtgagaagacgcctctccctgttccttaacgttcgcacacaagtcgctgccgattggaccgcccttgccgaagaaatggactttgaatacctggaaattagacaacttgaaacacaggccgaccccactggcagactcctggacgcatggcagggaagacctggtgcaagcgttggacggctcctggatctcctgacaaaactgggacgcgacgacgtactgcttgaactcggacctagcattgaagaagactgccaaaaatatatcctgaaacaacaacaagaagaagccgaaaaacctctccaagtcgcagcagtggactcatcagtaccccgaacagctgagcttgctgggattactacactcgacgacccactcggacatatgcctgaaagattcgacgctttcatttgctattgcccctctgacata

SEQ ID NO: 214 - protein, 171 aa, synthetic construct
  REGION 1..171: note = Description of Artificial Sequence: Synthetic polypeptide
AAGGPGAGSAAPVSSTSSLPLAALNMRVRRRLSLFLNVRTQVAADWTALAEEMDFEYLEIRQLETQADPTGRLLDAWQGRPGASVGRLLDLLTKLGRDDVLLELGPSIEEDCQKYILKQQQEEAEKPLQVAAVDSSVPRTAELAGITTLDDPLGHMPERFDAFICYCPSDI

SEQ ID NO: 215 - DNA, 189 bp, synthetic construct
  misc_feature 1..189: note = Description of Artificial Sequence: Synthetic polynucleotide
  source 1..189: mol_type = other DNA
aagaaagttgcaaagaaacccacaaataaagccccacaccctaaacaggaaccccaagaaatcaatttcccagatgatctccctggatctaatactgccgccccggtccaagaaaccctgcatggttgccagcctgtcacccaagaggacggaaaagaatcacggattagcgtacaagagagacaatag

SEQ ID NO: 216 - protein, 62 aa, synthetic construct
  REGION 1..62: note = Description of Artificial Sequence: Synthetic polypeptide
KKVAKKPTNKAPHPKQEPQEINFPDDLPGSNTAAPVQETLHGCQPVTQEDGKESRISVQERQ

SEQ ID NO: 217 - DNA, 63 bp, synthetic construct; identical to SEQ ID NO: 142
  misc_feature 1..63: note = Description of Artificial Sequence: Synthetic oligonucleotide
  source 1..63: mol_type = other DNA

SEQ ID NO: 218 - protein, 21 aa, synthetic construct
  REGION 1..21: note = Description of Artificial Sequence: Synthetic peptide
MEFGLSWLFLVAILKGVQCSR

SEQ ID NO: 219 - DNA, 321 bp, synthetic construct; identical to SEQ ID NO: 144
  misc_feature 1..321: note = Description of Artificial Sequence: Synthetic polynucleotide
  source 1..321: mol_type = other DNA

SEQ ID NO: 220 - protein, 107 aa, synthetic construct; identical to SEQ ID NO: 145
  REGION 1..107: note = Description of Artificial Sequence: Synthetic polypeptide

SEQ ID NO: 221 - DNA, 24 bp, synthetic construct
  misc_feature 1..24: note = Description of Artificial Sequence: Synthetic oligonucleotide
  source 1..24: mol_type = other DNA
ggcggaggaagcggaggtgggggc

SEQ ID NO: 222 - protein, 8 aa, synthetic construct
  REGION 1..8: note = Description of Artificial Sequence: Synthetic peptide
GGGSGGGG

SEQ ID NO: 223 - DNA, 360 bp, synthetic construct; identical to SEQ ID NO: 148
  misc_feature 1..360: note = Description of Artificial Sequence: Synthetic polynucleotide
  source 1..360: mol_type = other DNA

SEQ ID NO: 224 - protein, 120 aa, synthetic construct; identical to SEQ ID NO: 149
  REGION 1..120: note = Description of Artificial Sequence: Synthetic polypeptide

SEQ ID NO: 225 - DNA, 12 bp, synthetic construct
  misc_feature 1..12: note = Description of Artificial Sequence: Synthetic oligonucleotide
  source 1..12: mol_type = other DNA
ggggatcccgcc

SEQ ID NO: 226 - protein, 4 aa, synthetic construct
  REGION 1..4: note = Description of Artificial Sequence: Synthetic peptide
GDPA

SEQ ID NO: 227 - DNA, 36 bp, synthetic construct; identical to SEQ ID NO: 199
  misc_feature 1..36: note = Description of Artificial Sequence: Synthetic oligonucleotide
  source 1..36: mol_type = other DNA

SEQ ID NO: 228 - protein, 12 aa, synthetic construct
  REGION 1..12: note = Description of Artificial Sequence: Synthetic peptide
EPKSPDKTHTCP

SEQ ID NO: 229 - DNA, 339 bp, synthetic construct; identical to SEQ ID NO: 201
  misc_feature 1..339: note = Description of Artificial Sequence: Synthetic polynucleotide
  source 1..339: mol_type = other DNA

SEQ ID NO: 230 - protein, 113 aa, synthetic construct; identical to SEQ ID NO: 202
  REGION 1..113: note = Description of Artificial Sequence: Synthetic polypeptide

SEQ ID NO: 231 - DNA, 321 bp, synthetic construct; identical to SEQ ID NO: 203
  misc_feature 1..321: note = Description of Artificial Sequence: Synthetic polynucleotide
  source 1..321: mol_type = other DNA

SEQ ID NO: 232 - protein, 107 aa, synthetic construct; identical to SEQ ID NO: 204
  REGION 1..107: note = Description of Artificial Sequence: Synthetic polypeptide

SEQ ID NO: 233 - DNA, 12 bp, synthetic construct
  misc_feature 1..12: note = Description of Artificial Sequence: Synthetic oligonucleotide
  source 1..12: mol_type = other DNA
aaagatcccaaa

SEQ ID NO: 234 - protein, 4 aa, synthetic construct
  REGION 1..4: note = Description of Artificial Sequence: Synthetic peptide
KDPK

SEQ ID NO: 235 - DNA, 72 bp, synthetic construct; identical to SEQ ID NO: 207
  misc_feature 1..72: note = Description of Artificial Sequence: Synthetic oligonucleotide
  source 1..72: mol_type = other DNA

SEQ ID NO: 236 - protein, 24 aa, synthetic construct
  REGION 1..24: note = Description of Artificial Sequence: Synthetic peptide
FWVLVVVGGVLACYSLLVTVAFII

SEQ ID NO: 237-238 - skipped (2 entries)

SEQ ID NO: 239 - DNA, 516 bp, synthetic construct
  misc_feature 1..516: note = Description of Artificial Sequence: Synthetic polynucleotide
  source 1..516: mol_type = other DNA
atggccgctgggggcccaggcgccggatcagctgctcccgtatcttctacttcttctttgccgctggctgctctgaacatgcgcgtgagaagacgcctctccctgttccttaacgttcgcacacaagtcgctgccgattggaccgcccttgccgaagaaatggactttgaatacctggaaattagacaacttgaaacacaggccgaccccactggcagactcctggacgcatggcagggaagacctggtgcaagcgttggacggctcctggatctcctgacaaaactgggacgcgacgacgtactgcttgaactcggacctagcattgaagaagactgccaaaaatatatcctgaaacaacaacaagaagaagccgaaaaacctctccaagtcgcagcagtggactcatcagtaccccgaacagctgagcttgctgggattactacactcgacgacccactcggacatatgcctgaaagattcgacgctttcatttgctattgcccctctgacata

SEQ ID NO: 240 - protein, 172 aa, synthetic construct
  REGION 1..172: note = Description of Artificial Sequence: Synthetic polypeptide
MAAGGPGAGSAAPVSSTSSLPLAALNMRVRRRLSLFLNVRTQVAADWTALAEEMDFEYLEIRQLETQADPTGRLLDAWQGRPGASVGRLLDLLTKLGRDDVLLELGPSIEEDCQKYILKQQQEEAEKPLQVAAVDSSVPRTAELAGITTLDDPLGHMPERFDAFICYCPSDI

SEQ ID NO: 241 - DNA, 186 bp, synthetic construct
  misc_feature 1..186: note = Description of Artificial Sequence: Synthetic polynucleotide
  source 1..186: mol_type = other DNA
aagaaagttgcaaagaaacccacaaataaagccccacaccctaaacaggaaccccaagaaatcaatttcccagatgatctccctggatctaatactgccgccccggtccaagaaaccctgcatggttgccagcctgtcacccaagaggacggaaaagaatcacggattagcgtacaagagagacaa

SEQ ID NO: 242 - protein, 62 aa, synthetic construct; identical to SEQ ID NO: 216
  REGION 1..62: note = Description of Artificial Sequence: Synthetic polypeptide

SEQ ID NO: 243 - DNA, 15 bp, synthetic construct
  misc_feature 1..15: note = Description of Artificial Sequence: Synthetic oligonucleotide
  source 1..15: mol_type = other DNA
gcggccgcagtcgag

SEQ ID NO: 244 - protein, 5 aa, synthetic construct
  REGION 1..5: note = Description of Artificial Sequence: Synthetic peptide
AAAVE

SEQ ID NO: 245 - DNA, 339 bp, synthetic construct
  misc_feature 1..339: note = Description of Artificial Sequence: Synthetic polynucleotide
  source 1..339: mol_type = other DNA
agagtgaagttcagcaggagcgcagacgcccccgcgtaccagcagggccagaaccagctctataacgagctcaatctaggacgaagagaggagtacgatgttttggacaagagacgtggccgggaccctgagatggggggaaagccgagaaggaagaaccctcaggaaggcctgtacaatgaactgcagaaagataagatggcggaggcctacagtgagattgggatgaaaggcgagcgccggaggggcaaggggcacgatggcctttaccagggtctcagtacagccaccaaggacacctacgacgcccttcacatgcaggccctgccccctcgctaa

SEQ ID NO: 246 - protein, 112 aa, synthetic construct; identical to SEQ ID NO: 161
  REGION 1..112: note = Description of Artificial Sequence: Synthetic polypeptide

SEQ ID NO: 247 - DNA, 42 bp, synthetic construct
  misc_feature 1..42: note = Description of Artificial Sequence: Synthetic oligonucleotide
  source 1..42: mol_type = other DNA
atggggagtagcaagagcaagcctaaggaccccagccagcgc

SEQ ID NO: 248 - protein, 14 aa, synthetic construct
  REGION 1..14: note = Description of Artificial Sequence: Synthetic peptide
MGSSKSKPKDPSQR

SEQ ID NO: 249-250 - skipped (2 entries)

SEQ ID NO: 251 - DNA, 516 bp, synthetic construct
  misc_feature 1..516: note = Description of Artificial Sequence: Synthetic polynucleotide
  source 1..516: mol_type = other DNA
atggctgcaggaggtcccggcgcggggtctgcggccccggtctcctccacatcctcccttcccctggctgctctcaacatgcgagtgcggcgccgcctgtctctgttcttgaacgtgcggacacaggtggcggccgactggaccgcgctggcggaggagatggactttgagtacttggagatccggcaactggagacacaagcggaccccactggcaggctgctggacgcctggcagggacgccctggcgcctctgtaggccgactgctcgatctgcttaccaagctgggccgcgacgacgtgctgctggagctgggacccagcattgaggaggattgccaaaagtatatcttgaagcagcagcaggaggaggctgagaagcctttacaggtggccgctgtagacagcagtgtcccacggacagcagagctggcgggcatcaccacacttgatgaccccctggggcatatgcctgagcgtttcgatgccttcatctgctattgccccagcgacatc

SEQ ID NO: 252 - protein, 172 aa, synthetic construct; identical to SEQ ID NO: 240
  REGION 1..172: note = Description of Artificial Sequence: Synthetic polypeptide

SEQ ID NO: 253-254 - skipped (2 entries)

SEQ ID NO: 255 - DNA, 186 bp, synthetic construct
  misc_feature 1..186: note = Description of Artificial Sequence: Synthetic polynucleotide
  source 1..186: mol_type = other DNA
aaaaaggtggccaagaagccaaccaataaggccccccaccccaagcaggagccccaggagatcaattttcccgacgatcttcctggctccaacactgctgctccagtgcaggagactttacatggatgccaaccggtcacccaggaggatggcaaagagagtcgcatctcagtgcaggagagacag

SEQ ID NO: 256 - protein, 62 aa, synthetic construct; identical to SEQ ID NO: 216
  REGION 1..62: note = Description of Artificial Sequence: Synthetic polypeptide

SEQ ID NO: 257-258 - skipped (2 entries)

SEQ ID NO: 259 - DNA, 54 bp, synthetic construct; identical to SEQ ID NO: 138
  misc_feature 1..54: note = Description of Artificial Sequence: Synthetic oligonucleotide
  source 1..54: mol_type = other DNA

SEQ ID NO: 260 - protein, 18 aa, synthetic construct
  REGION 1..18: note = Description of Artificial Sequence: Synthetic peptide
EGRGSLLTCGDVEENPGP

SEQ ID NO: 261 - DNA, 63 bp, synthetic construct; identical to SEQ ID NO: 142
  misc_feature 1..63: note = Description of Artificial Sequence: Synthetic oligonucleotide
  source 1..63: mol_type = other DNA

SEQ ID NO: 262 - protein, 21 aa, synthetic construct
  REGION 1..21: note = Description of Artificial Sequence: Synthetic peptide
MEFGLSWLFLVAILKGVQCSR

SEQ ID NO: 263 - DNA, 321 bp, synthetic construct; identical to SEQ ID NO: 144
  misc_feature 1..321: note = Description of Artificial Sequence: Synthetic polynucleotide
  source 1..321: mol_type = other DNA

SEQ ID NO: 264 - protein, 107 aa, synthetic construct; identical to SEQ ID NO: 145
  REGION 1..107: note = Description of Artificial Sequence: Synthetic polypeptide

SEQ ID NO: 265 - DNA, 24 bp, synthetic construct
  misc_feature 1..24: note = Description of Artificial Sequence: Synthetic oligonucleotide
  source 1..24: mol_type = other DNA
ggcggaggaagcggaggtgggggc

SEQ ID NO: 266 - protein, 8 aa, synthetic construct
  REGION 1..8: note = Description of Artificial Sequence: Synthetic peptide
GGGSGGGG

SEQ ID NO: 267 - DNA, 360 bp, synthetic construct; identical to SEQ ID NO: 148
  misc_feature 1..360: note = Description of Artificial Sequence: Synthetic polynucleotide
  source 1..360: mol_type = other DNA

SEQ ID NO: 268 - protein, 120 aa, synthetic construct; identical to SEQ ID NO: 149
  REGION 1..120: note = Description of Artificial Sequence: Synthetic polypeptide

SEQ ID NO: 269-270 - skipped (2 entries)

SEQ ID NO: 271 - DNA, 48 bp, synthetic construct; identical to SEQ ID NO: 152
  misc_feature 1..48: note = Description of Artificial Sequence: Synthetic oligonucleotide
  source 1..48: mol_type = other DNA

SEQ ID NO: 272 - protein, 16 aa, synthetic construct
  REGION 1..16: note = Description of Artificial Sequence: Synthetic peptide
ELPTQGTFSNVSTNVS

SEQ ID NO: 273 - DNA, 126 bp, synthetic construct; identical to SEQ ID NO: 154
  misc_feature 1..126: note = Description of Artificial Sequence: Synthetic polynucleotide
  source 1..126: mol_type = other DNA

SEQ ID NO: 274 - protein, 42 aa, synthetic construct; identical to SEQ ID NO: 155
  REGION 1..42: note = Description of Artificial Sequence: Synthetic polypeptide

SEQ ID NO: 275 - DNA, 111 bp, synthetic construct; identical to SEQ ID NO: 156
  misc_feature 1..111: note = Description of Artificial Sequence: Synthetic polynucleotide
  source 1..111: mol_type = other DNA

SEQ ID NO: 276 - protein, 37 aa, synthetic construct; identical to SEQ ID NO: 157
  REGION 1..37: note = Description of Artificial Sequence: Synthetic polypeptide

SEQ ID NO: 277-278 - skipped (2 entries)

SEQ ID NO: 279 - DNA, 336 bp, synthetic construct; identical to SEQ ID NO: 160
  misc_feature 1..336: note = Description of Artificial Sequence: Synthetic polynucleotide
  source 1..336: mol_type = other DNA

SEQ ID NO: 280 - protein, 112 aa, synthetic construct; identical to SEQ ID NO: 161
  REGION 1..112: note = Description of Artificial Sequence: Synthetic polypeptide

SEQ ID NO: 281 - DNA, 888 bp, synthetic construct
  misc_feature 1..888: note = Description of Artificial Sequence: Synthetic polynucleotide
  source 1..888: mol_type = other DNA
atggctgcaggaggtcccggcgcggggtctgcggccccggtctcctccacatcctcccttcccctggctgctctcaacatgcgagtgcggcgccgcctgtctctgttcttgaacgtgcggacacaggtggcggccgactggaccgcgctggcggaggagatggactttgagtacttggagatccggcaactggagacacaagcggaccccactggcaggctgctggacgcctggcagggacgccctggcgcctctgtaggccgactgctcgagctgcttaccaagctgggccgcgacgacgtgctgctggagctgggacccagcattgaggaggattgccaaaagtatatcttgaagcagcagcaggaggaggctgagaagcctttacaggtggccgctgtagacagcagtgtcccacggacagcagagctggcgggcatcaccacacttgatgaccccctggggcatatgcctgagcgtttcgatgccttcatctgctattgccccagcgacatccagtttgtgcaggagatgatccggcaactggaacagacaaactatcgactgaagttgtgtgtgtctgaccgcgatgtcctgcctggcacctgtgtctggtctattgctagtgagctcatcgaaaagaggtgccgccggatggtggtggttgtctctgatgattacctgcagagcaaggaatgtgacttccagaccaaatttgcactcagcctctctccaggtgcccatcagaagcgactgatccccatcaagtacaaggcaatgaagaaagagttccccagcatcctgaggttcatcactgtctgcgactacaccaacccctgcaccaaatcttggttctggactcgccttgccaaggccttgtccctgccc

SEQ ID NO: 282 - protein, 296 aa, synthetic construct
  REGION 1..296: note = Description of Artificial Sequence: Synthetic polypeptide
MAAGGPGAGSAAPVSSTSSLPLAALNMRVRRRLSLFLNVRTQVAADWTALAEEMDFEYLEIRQLETQADPTGRLLDAWQGRPGASVGRLLELLTKLGRDDVLLELGPSIEEDCQKYILKQQQEEAEKPLQVAAVDSSVPRTAELAGITTLDDPLGHMPERFDAFICYCPSDIQFVQEMIRQLEQTNYRLKLCVSDRDVLPGTCVWSIASELIEKRCRRMVVVVSDDYLQSKECDFQTKFALSLSPGAHQKRLIPIKYKAMKKEFPSILRFITVCDYTNPCTKSWFWTRLAKALSLP

SEQ ID NO: 283 - protein, 16 aa, Homo sapiens
MGSNKSKPKDASQRRR

SEQ ID NO: 284 - protein, 5 aa, synthetic construct
  REGION 1..5: note = Description of Artificial Sequence: Synthetic peptide
  VARIANT 4: note = X is any amino acid
MGCXC

SEQ ID NO: 285 - protein, 6 aa, synthetic construct
  REGION 1..6: note = Description of Artificial Sequence: Synthetic peptide
GSGGGS

SEQ ID NO: 286 - protein, 5 aa, synthetic construct
  REGION 1..5: note = Description of Artificial Sequence: Synthetic peptide
SGGGS

SEQ ID NO: 287 - protein, 8 aa, synthetic construct
  REGION 1..8: note = Description of Artificial Sequence: Synthetic peptide
RAKFKQLL

SEQ ID NO: 288 - protein, 9 aa, synthetic construct
  REGION 1..9: note = Description of Artificial Sequence: Synthetic peptide
NLVPMVATV

SEQ ID NO: 289 - protein, 6 aa, synthetic construct
  REGION 1..6: note = Description of Artificial Sequence: Synthetic peptide
SGGGSG

SEQ ID NO: 290 - protein, 7 aa, Homo sapiens
TDPTRRF

SEQ ID NO: 291 - DNA, 18 bp, synthetic construct
  misc_feature 1..18: note = Description of Artificial Sequence: Synthetic primer
  source 1..18: mol_type = other DNA
tccgccctgagcaaagac

SEQ ID NO: 292 - DNA, 20 bp, synthetic construct
  misc_feature 1..20: note = Description of Artificial Sequence: Synthetic primer
  source 1..20: mol_type = other DNA
acgaactccagcaggaccat

SEQ ID NO: 293 - DNA, 15 bp, synthetic construct
  misc_feature 1..15: note = Description of Artificial Sequence: Synthetic probe
  source 1..15: mol_type = other DNA
acgagaagcgcgatc

SEQ ID NO: 294 - DNA, 19 bp, synthetic construct
  misc_feature 1..19: note = Description of Artificial Sequence: Synthetic primer
  source 1..19: mol_type = other DNA
ctggaatctggcggtggat

SEQ ID NO: 295 - DNA, 23 bp, synthetic construct
  misc_feature 1..23: note = Description of Artificial Sequence: Synthetic primer
  source 1..23: mol_type = other DNA
caaactctcaagagcaccgacat

SEQ ID NO: 296 - DNA, 15 bp, synthetic construct
  misc_feature 1..15: note = Description of Artificial Sequence: Synthetic probe
  source 1..15: mol_type = other DNA
cggagtcgacggatt

SEQ ID NO: 297 - protein, 5 aa, Homo sapiens
GCFNF

SEQ ID NO: 298 - protein, 5 aa, synthetic construct
  REGION 1..5: note = Description of Artificial Sequence: Synthetic peptide
CIVSM

SEQ ID NO: 299 - protein, 4 aa, Homo sapiens
ATPF

SEQ ID NO: 300 - protein, 288 aa, synthetic construct; identical to SEQ ID NO: 45
  REGION 1..288: note = Description of Artificial Sequence: Synthetic polypeptide

SEQ ID NO: 301 - protein, 5 aa, synthetic construct
  REGION 1..5: note = Description of Artificial Sequence: Synthetic peptide
DAISS

SEQ ID NO: 302 - protein, 5 aa, synthetic construct
  REGION 1..5: note = Description of Artificial Sequence: Synthetic peptide
AAAAA

SEQ ID NO: 303 - protein, 5 aa, synthetic construct
  REGION 1..5: note = Description of Artificial Sequence: Synthetic peptide
ISAQT

SEQ ID NO: 304 - protein, 4 aa, synthetic construct
  REGION 1..4: note = Description of Artificial Sequence: Synthetic peptide
AVPI

SEQ ID NO: 305 - protein, 5 aa, synthetic construct
  REGION 1..5: note = Description of Artificial Sequence: Synthetic peptide
YCSTL

SEQ ID NO: 306 - protein, 5 aa, synthetic construct
  REGION 1..5: note = Description of Artificial Sequence: Synthetic peptide
CIVSM

SEQ ID NO: 307 - protein, 5 aa, synthetic construct
  REGION 1..5: note = Description of Artificial Sequence: Synthetic peptide
QPTFT

SEQ ID NO: 308 - DNA, 54 bp, synthetic construct; identical to SEQ ID NO: 138
  misc_feature 1..54: note = Description of Artificial Sequence: Synthetic oligonucleotide
  source 1..54: mol_type = other DNA

SEQ ID NO: 309 - DNA, 1002 bp, synthetic construct
  misc_feature 1..1002: note = Description of Artificial Sequence: Synthetic polynucleotide
  source 1..1002: mol_type = other DNA
atgccaccacctcgcctgctgttctttctgctgttcctgacacctatggaggtgcgacctgaggaaccactggtcgtgaaggtcgaggaaggcgacaatgccgtgctgcagtgcctgaaaggcacttctgatgggccaactcagcagctgacctggtccagggagtctcccctgaagccttttctgaaactgagcctgggactgccaggactgggaatccacatgcgccctctggctatctggctgttcatcttcaacgtgagccagcagatgggaggattctacctgtgccagccaggaccaccatccgagaaggcctggcagcctggatggaccgtcaacgtggaggggtctggagaactgtttaggtggaatgtgagtgacctgggaggactgggatgtgggctgaagaaccgctcctctgaaggcccaagttcaccctcagggaagctgatgagcccaaaactgtacgtgtgggccaaagatcggcccgagatctgggagggagaacctccatgcctgccacctagagacagcctgaatcagagtctgtcacaggatctgacaatggcccccgggtccactctgtggctgtcttgtggagtcccacccgacagcgtgtccagaggccctctgtcctggacccacgtgcatcctaaggggccaaaaagtctgctgtcactggaactgaaggacgatcggcctgccagagacatgtgggtcatggagactggactgctgctgccacgagcaaccgcacaggatgctggaaaatactattgccaccggggcaatctgacaatgtccttccatctggagatcactgcaaggcccgtgctgtggcactggctgctgcgaaccggaggatggaaggtcagtgctgtgacactggcatatctgatcttttgcctgtgctccctggtgggcattctgcatctgcagagagccctggtgctgcggagaaagagaaagagaatgactgacccaacaagaaggttttga

SEQ ID NO: 310 - protein, 333 aa, synthetic construct; identical to SEQ ID NO: 15
  REGION 1..333: note = Description of Artificial Sequence: Synthetic polypeptide

SEQ ID NO: 311 - DNA, 329 bp, synthetic construct
  misc_feature 1..329: note = Description of Artificial Sequence: Synthetic polynucleotide
  source 1..329: mol_type = other DNA
atgctcgagggagtgcaggtggagactatctccccaggagacgggcgcaccttccccaagcgcggccagacctgcgtggtgcactacaccgggatgcttgaagatggaaagaaagttgattcctcccgggacagaaacaagccctttaagtttatgctaggcaagcaggaggtgatccgaggctgggaagaaggggttgcccagatgagtgtgggtcagagagccaaactgactatatctccagattatgcctatggtgccactgggcacccaggcatcatcccaccacatgccactctcgtcttcgatgtggagcttctaaaactgga

SEQ ID NO: 312 - DNA, 18 bp, synthetic construct
  misc_feature 1..18: note = Description of Artificial Sequence: Synthetic oligonucleotide
  source 1..18: mol_type = other DNA
tctggcggtggatccgga

SEQ ID NO: 313 - DNA, 54 bp, synthetic construct
  misc_feature 1..54: note = Description of Artificial Sequence: Synthetic oligonucleotide
  source 1..54: mol_type = other DNA
gagggcaggggaagtcttctaacatgcggggacgtggaggaaaatcccgggccc

SEQ ID NO: 314 - protein, 110 aa, synthetic construct; identical to SEQ ID NO: 36
  REGION 1..110: note = Description of Artificial Sequence: Synthetic polypeptide

SEQ ID NO: 315 - protein, 6 aa, synthetic construct
  REGION 1..6: note = Description of Artificial Sequence: Synthetic peptide
SGGGSG

SEQ ID NO: 316 - protein, 18 aa, synthetic construct
  REGION 1..18: note = Description of Artificial Sequence: Synthetic peptide
EGRGSLLTCGDVEENPGP

SEQ ID NO: 317 - DNA, 321 bp, synthetic construct
  misc_feature 1..321: note = Description of Artificial Sequence: Synthetic polynucleotide
  source 1..321: mol_type = other DNA
ggagtgcaggtggagactattagccccggagatggcagaacattccccaaaagaggacagacttgcgtcgtgcattatactggaatgctggaagacggcaagaaggtggacagcagccgggaccgaaacaagcccttcaagttcatgctggggaagcaggaagtgatccggggctgggaggaaggagtcgcacagatgtcagtgggacagagggccaaactgactattagcccagactacgcttatggagcaaccggccaccccgggatcattccccctcatgctacactggtcttcgatgtggagctgctgaagctggaa

SEQ ID NO: 318 - DNA, 18 bp, synthetic construct
  misc_feature 1..18: note = Description of Artificial Sequence: Synthetic oligonucleotide
  source 1..18: mol_type = other DNA
agcggaggaggatccgga

SEQ ID NO: 319 - DNA, 60 bp, synthetic construct
  misc_feature 1..60: note = Description of Artificial Sequence: Synthetic oligonucleotide
  source 1..60: mol_type = other DNA
ccgcgggaaggccgagggagcctgctgacatgtggcgatgtggaggaaaacccaggacca

SEQ ID NO: 320 - protein, 18 aa, synthetic construct
  REGION 1..18: note = Description of Artificial Sequence: Synthetic peptide
EGRGSLLTCGDVEENPGP

SEQ ID NO: 321 - DNA, 330 bp, synthetic construct; identical to SEQ ID NO: 35
  misc_feature 1..330: note = Description of Artificial Sequence: Synthetic polynucleotide
  source 1..330: mol_type = other DNA

SEQ ID NO: 322 - protein, 110 aa, synthetic construct; identical to SEQ ID NO: 36
  REGION 1..110: note = Description of Artificial Sequence: Synthetic polypeptide

SEQ ID NO: 323 - DNA, 18 bp, synthetic construct
  misc_feature 1..18: note = Description of Artificial Sequence: Synthetic oligonucleotide
  source 1..18: mol_type = other DNA
agcggaggaggatccgga

SEQ ID NO: 324 - protein, 6 aa, synthetic construct
  REGION 1..6: note = Description of Artificial Sequence: Synthetic peptide
SGGGSG

SEQ ID NO: 325 - DNA, 864 bp, synthetic construct; identical to SEQ ID NO: 46
  misc_feature 1..864: note = Description of Artificial Sequence: Synthetic polynucleotide
  source 1..864: mol_type = other DNA

SEQ ID NO: 326 - protein, 288 aa, synthetic construct; identical to SEQ ID NO: 45
  REGION 1..288: note = Description of Artificial Sequence: Synthetic polypeptide

SEQ ID NO: 327-328 - skipped (2 entries)

SEQ ID NO: 329 - DNA, 54 bp, synthetic construct; identical to SEQ ID NO: 138
  misc_feature 1..54: note = Description of Artificial Sequence: Synthetic oligonucleotide
  source 1..54: mol_type = other DNA

SEQ ID NO: 330 - protein, 18 aa, synthetic construct
  REGION 1..18: note = Description of Artificial Sequence: Synthetic peptide
EGRGSLLTCGDVEENPGP

SEQ ID NO: 331-332 - skipped (2 entries)

SEQ ID NO: 333 - DNA, 63 bp, synthetic construct; identical to SEQ ID NO: 142
  misc_feature 1..63: note = Description of Artificial Sequence: Synthetic oligonucleotide
  source 1..63: mol_type = other DNA

SEQ ID NO: 334 - protein, 21 aa, synthetic construct
  REGION 1..21: note = Description of Artificial Sequence: Synthetic peptide
MEFGLSWLFLVAILKGVQCSR

SEQ ID NO: 335 - DNA, 321 bp, synthetic construct; identical to SEQ ID NO: 144
  misc_feature 1..321: note = Description of Artificial Sequence: Synthetic polynucleotide
  source 1..321: mol_type = other DNA

SEQ ID NO: 336 - protein, 107 aa, synthetic construct; identical to SEQ ID NO: 145
  REGION 1..107: note = Description of Artificial Sequence: Synthetic polypeptide

SEQ ID NO: 337 - DNA, 24 bp, synthetic construct
  misc_feature 1..24: note = Description of Artificial Sequence: Synthetic oligonucleotide
  source 1..24: mol_type = other DNA
ggcggaggaagcggaggtgggggc

SEQ ID NO: 338 - protein, 8 aa, synthetic construct
  REGION 1..8: note = Description of Artificial Sequence: Synthetic peptide
GGGSGGGG

SEQ ID NO: 339 - DNA, 360 bp, synthetic construct; identical to SEQ ID NO: 148
  misc_feature 1..360: note = Description of Artificial Sequence: Synthetic polynucleotide
  source 1..360: mol_type = other DNA

SEQ ID NO: 340 - protein, 120 aa, synthetic construct; identical to SEQ ID NO: 149
  REGION 1..120: note = Description of Artificial Sequence: Synthetic polypeptide

SEQ ID NO: 341-342 - skipped (2 entries)

SEQ ID NO: 343 - DNA, 48 bp, synthetic construct; identical to SEQ ID NO: 152
  misc_feature 1..48: note = Description of Artificial Sequence: Synthetic oligonucleotide
  source 1..48: mol_type = other DNA

SEQ ID NO: 344 - protein, 16 aa, synthetic construct
  REGION 1..16: note = Description of Artificial Sequence: Synthetic peptide
ELPTQGTFSNVSTNVS

SEQ ID NO: 345 - DNA, 126 bp, synthetic construct; identical to SEQ ID NO: 154
  misc_feature 1..126: note = Description of Artificial Sequence: Synthetic polynucleotide
  source 1..126: mol_type = other DNA

SEQ ID NO: 346 - protein, 42 aa, synthetic construct; identical to SEQ ID NO: 155
  REGION 1..42: note = Description of Artificial Sequence: Synthetic polypeptide

SEQ ID NO: 347 - DNA, 111 bp, synthetic construct; identical to SEQ ID NO: 156
  misc_feature 1..111: note = Description of Artificial Sequence: Synthetic polynucleotide
  source 1..111: mol_type = other DNA

SEQ ID NO: 348 - protein, 37 aa, synthetic construct; identical to SEQ ID NO: 157
  REGION 1..37: note = Description of Artificial Sequence: Synthetic polypeptide

SEQ ID NO: 349-350 - skipped (2 entries)

SEQ ID NO: 351 - DNA, 516 bp, synthetic construct; identical to SEQ ID NO: 239
  misc_feature 1..516: note = Description of Artificial Sequence: Synthetic polynucleotide
  source 1..516: mol_type = other DNA

SEQ ID NO: 352 - protein, 172 aa, synthetic construct; identical to SEQ ID NO: 240
  REGION 1..172: note = Description of Artificial Sequence: Synthetic polypeptide

SEQ ID NO: 353 - DNA, 186 bp, synthetic construct; identical to SEQ ID NO: 241
  misc_feature 1..186: note = Description of Artificial Sequence: Synthetic polynucleotide
  source 1..186: mol_type = other DNA

SEQ ID NO: 354 - protein, 62 aa, synthetic construct; identical to SEQ ID NO: 216
  REGION 1..62: note = Description of Artificial Sequence: Synthetic polypeptide

SEQ ID NO: 355 - DNA, 336 bp, synthetic construct; identical to SEQ ID NO: 160
  misc_feature 1..336: note = Description of Artificial Sequence: Synthetic polynucleotide
  source 1..336: mol_type = other DNA

SEQ ID NO: 356 - protein, 112 aa, synthetic construct; identical to SEQ ID NO: 161
  REGION 1..112: note = Description of Artificial Sequence: Synthetic polypeptide

SEQ ID NO: 357 - DNA, 63 bp, synthetic construct; identical to SEQ ID NO: 142
  misc_feature 1..63: note = Description of Artificial Sequence: Synthetic oligonucleotide
  source 1..63: mol_type = other DNA

SEQ ID NO: 358 - protein, 21 aa, synthetic construct
  REGION 1..21: note = Description of Artificial Sequence: Synthetic peptide
MEFGLSWLFLVAILKGVQCSR

SEQ ID NO: 359 - DNA, 327 bp, synthetic construct; identical to SEQ ID NO: 164
  misc_feature 1..327: note = Description of Artificial Sequence: Synthetic polynucleotide
  source 1..327: mol_type = other DNA

SEQ ID NO: 360 - protein, 109 aa, synthetic construct; identical to SEQ ID NO: 165
  REGION 1..109: note = Description of Artificial Sequence: Synthetic polypeptide

SEQ ID NO: 361 - DNA, 24 bp, synthetic construct
  misc_feature 1..24: note = Description of Artificial Sequence: Synthetic oligonucleotide
  source 1..24: mol_type = other DNA
ggcggaggaagcggaggtgggggc

SEQ ID NO: 362 - protein, 8 aa, synthetic construct
  REGION 1..8: note = Description of Artificial Sequence: Synthetic peptide
GGGSGGGG

SEQ ID NO: 363 - DNA, 357 bp, synthetic construct; identical to SEQ ID NO: 168
  misc_feature 1..357: note = Description of Artificial Sequence: Synthetic polynucleotide
  source 1..357: mol_type = other DNA

SEQ ID NO: 364 - protein, 119 aa, synthetic construct; identical to SEQ ID NO: 169
  REGION 1..119: note = Description of Artificial Sequence: Synthetic polypeptide

SEQ ID NO: 365-366 - skipped (2 entries)

SEQ ID NO: 367 - DNA, 48 bp, synthetic construct; identical to SEQ ID NO: 152
  misc_feature 1..48: note = Description of Artificial Sequence: Synthetic oligonucleotide
  source 1..48: mol_type = other DNA

SEQ ID NO: 368 - protein, 16 aa, synthetic construct
  REGION 1..16: note = Description of Artificial Sequence: Synthetic peptide
ELPTQGTFSNVSTNVS

SEQ ID NO: 369 - DNA, 126 bp, synthetic construct; identical to SEQ ID NO: 154
  misc_feature 1..126: note = Description of Artificial Sequence: Synthetic polynucleotide
  source 1..126: mol_type = other DNA

SEQ ID NO: 370 - protein, 42 aa, synthetic construct; identical to SEQ ID NO: 155
  REGION 1..42: note = Description of Artificial Sequence: Synthetic polypeptide

SEQ ID NO: 371 - DNA, 111 bp, synthetic construct; identical to SEQ ID NO: 156
  misc_feature 1..111: note = Description of Artificial Sequence: Synthetic polynucleotide
  source 1..111: mol_type = other DNA

SEQ ID NO: 372 - protein, 37 aa, synthetic construct; identical to SEQ ID NO: 157
  REGION 1..37: note = Description of Artificial Sequence: Synthetic polypeptide

SEQ ID NO: 373-374 - skipped (2 entries)

SEQ ID NO: 375 - DNA, 516 bp, synthetic construct; identical to SEQ ID NO: 239
  misc_feature 1..516: note = Description of Artificial Sequence: Synthetic polynucleotide
  source 1..516: mol_type = other DNA

SEQ ID NO: 376 - protein, 172 aa, synthetic construct; identical to SEQ ID NO: 240
  REGION 1..172: note = Description of Artificial Sequence: Synthetic polypeptide

SEQ ID NO: 377 - DNA, 186 bp, synthetic construct; identical to SEQ ID NO: 241
  misc_feature 1..186: note = Description of Artificial Sequence: Synthetic polynucleotide
  source 1..186: mol_type = other DNA

SEQ ID NO: 378 - protein, 62 aa, synthetic construct; identical to SEQ ID NO: 216
  REGION 1..62: note = Description of Artificial Sequence: Synthetic polypeptide

SEQ ID NO: 379 - DNA, 15 bp, synthetic construct
  misc_feature 1..15: note = Description of Artificial Sequence: Synthetic oligonucleotide
  source 1..15: mol_type = other DNA
gcggccgcagtcgag

SEQ ID NO: 380 - protein, 5 aa, synthetic construct
  REGION 1..5: note = Description of Artificial Sequence: Synthetic peptide
AAAVE

SEQ ID NO: 381 - DNA, 336 bp, synthetic construct; identical to SEQ ID NO: 160
  misc_feature 1..336: note = Description of Artificial Sequence: Synthetic polynucleotide
  source 1..336: mol_type = other DNA

SEQ ID NO: 382 - protein, 112 aa, synthetic construct; identical to SEQ ID NO: 161
  REGION 1..112: note = Description of Artificial Sequence: Synthetic polypeptide

SEQ ID NO: 383 - protein, 282 aa, synthetic construct; identical to SEQ ID NO: 22
  REGION 1..282: note = Description of Artificial Sequence: Synthetic polypeptide

SEQ ID NO: 384 - DNA, 846 bp, synthetic construct; identical to SEQ ID NO: 23
  misc_feature 1..846: note = Description of Artificial Sequence: Synthetic polynucleotide
  source 1..846: mol_type = other DNA

SEQ ID NO: 385 - protein, 282 aa, synthetic construct; identical to SEQ ID NO: 24
  REGION 1..282: note = Description of Artificial Sequence: Synthetic polypeptide

SEQ ID NO: 386 - DNA, 846 bp, synthetic construct; identical to SEQ ID NO: 25
  misc_feature 1..846: note = Description of Artificial Sequence: Synthetic polynucleotide
  source 1..846: mol_type = other DNA

SEQ ID NO: 387 - protein, 282 aa, synthetic construct; identical to SEQ ID NO: 26
  REGION 1..282: note = Description of Artificial Sequence: Synthetic polypeptide

SEQ ID NO: 388 - DNA, 846 bp, synthetic construct; identical to SEQ ID NO: 27
  misc_feature 1..846: note = Description of Artificial Sequence: Synthetic polynucleotide
  source 1..846: mol_type = other DNA

SEQ ID NO: 389 - protein, 282 aa, synthetic construct; identical to SEQ ID NO: 28
  REGION 1..282: note = Description of Artificial Sequence: Synthetic polypeptide

SEQ ID NO: 390 - DNA, 864 bp, synthetic construct; identical to SEQ ID NO: 39
  misc_feature 1..864: note = Description of Artificial Sequence: Synthetic polynucleotide
  source 1..864: mol_type = other DNA

SEQ ID NO: 391 - protein, 288 aa, synthetic construct; identical to SEQ ID NO: 40
  REGION 1..288: note = Description of Artificial Sequence: Synthetic polypeptide

SEQ ID NO: 392 - DNA, 864 bp, synthetic construct; identical to SEQ ID NO: 86
  misc_feature 1..864: note = Description of Artificial Sequence: Synthetic polynucleotide
  source 1..864: mol_type = other DNA

SEQ ID NO: 393 - DNA, 324 bp, synthetic construct
  misc_feature 1..324: note = Description of Artificial Sequence: Synthetic polynucleotide
  source 1..324: mol_type = other DNA
atgggagtgcaggtggagactattagccccggagatggcagaacattccccaaaagaggacagacttgcgtcgtgcattatactggaatgctggaagacggcaagaaggtggacagcagccgggaccgaaacaagcccttcaagttcatgctggggaagcaggaagtgatccggggctgggaggaaggagtcgcacagatgtcagtgggacagagggccaaactgactattagcccagactacgcttatggagcaaccggccaccccgggatcattccccctcatgctacactggtcttcgatgtggagctgctgaagctggaa

SEQ ID NO: 394 - protein, 108 aa, synthetic construct
  REGION 1..108: note = Description of Artificial Sequence: Synthetic polypeptide
MGVQVETISPGDGRTFPKRGQTCVVHYTGMLEDGKKVDSSRDRNKPFKFMLGKQEVIRGWEEGVAQMSVGQRAKLTISPDYAYGATGHPGIIPPHATLVFDVELLKLE

SEQ ID NO: 395 - DNA, 18 bp, synthetic construct
  misc_feature 1..18: note = Description of Artificial Sequence: Synthetic oligonucleotide
  source 1..18: mol_type = other DNA
agcggaggaggatccgga

SEQ ID NO: 396 - protein, 6 aa, synthetic construct
  REGION 1..6: note = Description of Artificial Sequence: Synthetic peptide
SGGGSG

SEQ ID NO: 397 - DNA, 864 bp, synthetic construct; identical to SEQ ID NO: 46
  misc_feature 1..864: note = Description of Artificial Sequence: Synthetic polynucleotide
  source 1..864: mol_type = other DNA

SEQ ID NO: 398-399 - skipped (2 entries)

SEQ ID NO: 400 - DNA, 54 bp, synthetic construct; identical to SEQ ID NO: 138
  misc_feature 1..54: note = Description of Artificial Sequence: Synthetic oligonucleotide
  source 1..54: mol_type = other DNA

SEQ ID NO: 401 - protein, 18 aa, synthetic construct
  REGION 1..18: note = Description of Artificial Sequence: Synthetic peptide
EGRGSLLTCGDVEENPGP

SEQ ID NO: 402-403 - skipped (2 entries)

SEQ ID NO: 404 - DNA, 63 bp, synthetic construct; identical to SEQ ID NO: 142
  misc_feature 1..63: note = Description of Artificial Sequence: Synthetic oligonucleotide
  source 1..63: mol_type = other DNA

SEQ ID NO: 405 - protein, 21 aa, synthetic construct
  REGION 1..21: note = Description of Artificial Sequence: Synthetic peptide
MEFGLSWLFLVAILKGVQCSR

SEQ ID NO: 406 - DNA, 321 bp, synthetic construct; identical to SEQ ID NO: 144
  misc_feature 1..321: note = Description of Artificial Sequence: Synthetic polynucleotide
  source 1..321: mol_type = other DNA

SEQ ID NO: 407 - protein, 107 aa, synthetic construct; identical to SEQ ID NO: 145
  REGION 1..107: note = Description of Artificial Sequence: Synthetic polypeptide

SEQ ID NO: 408 - DNA, 24 bp, synthetic construct
  misc_feature 1..24: note = Description of Artificial Sequence: Synthetic oligonucleotide
  source 1..24: mol_type = other DNA
ggcggaggaagcggaggtgggggc

SEQ ID NO: 409 - protein, 8 aa, synthetic construct
  REGION 1..8: note = Description of Artificial Sequence: Synthetic peptide
GGGSGGGG

SEQ ID NO: 410 - DNA, 360 bp, synthetic construct; identical to SEQ ID NO: 148
  misc_feature 1..360: note = Description of Artificial Sequence: Synthetic polynucleotide
  source 1..360: mol_type = other DNA

SEQ ID NO: 411 - protein, 120 aa, synthetic construct; identical to SEQ ID NO: 149
  REGION 1..120: note = Description of Artificial Sequence: Synthetic polypeptide

SEQ ID NO: 412-413 - skipped (2 entries)

SEQ ID NO: 414 - DNA, 48 bp, synthetic construct; identical to SEQ ID NO: 152
  misc_feature 1..48: note = Description of Artificial Sequence: Synthetic oligonucleotide
  source 1..48: mol_type = other DNA

SEQ ID NO: 415 - protein, 16 aa, synthetic construct
  REGION 1..16: note = Description of Artificial Sequence: Synthetic peptide
ELPTQGTFSNVSTNVS

SEQ ID NO: 416 - DNA, 126 bp, synthetic construct; identical to SEQ ID NO: 154
  misc_feature 1..126: note = Description of Artificial Sequence: Synthetic polynucleotide
  source 1..126: mol_type = other DNA

SEQ ID NO: 417 - protein, 42 aa, synthetic construct; identical to SEQ ID NO: 155
  REGION 1..42: note = Description of Artificial Sequence: Synthetic polypeptide

SEQ ID NO: 418 - DNA, 111 bp, synthetic construct; identical to SEQ ID NO: 156
  misc_feature 1..111: note = Description of Artificial Sequence: Synthetic polynucleotide
  source 1..111: mol_type = other DNA

SEQ ID NO: 419 - protein, 37 aa, synthetic construct; identical to SEQ ID NO: 157
  REGION 1..37: note = Description of Artificial Sequence: Synthetic polypeptide

SEQ ID NO: 420-421 - skipped (2 entries)

SEQ ID NO: 422 - DNA, 516 bp, synthetic construct; identical to SEQ ID NO: 239
  misc_feature 1..516: note = Description of Artificial Sequence: Synthetic polynucleotide
  source 1..516: mol_type = other DNA

SEQ ID NO: 423 - protein, 172 aa, synthetic construct; identical to SEQ ID NO: 240
  REGION 1..172: note = Description of Artificial Sequence: Synthetic polypeptide

SEQ ID NO: 424 - DNA, 186 bp, synthetic construct; identical to SEQ ID NO: 241
  misc_feature 1..186: note = Description of Artificial Sequence: Synthetic polynucleotide
  source 1..186: mol_type = other DNA

SEQ ID NO: 425 - protein, 62 aa, synthetic construct; identical to SEQ ID NO: 216
  REGION 1..62: note = Description of Artificial Sequence: Synthetic polypeptide

SEQ ID NO: 426 - DNA, 336 bp, synthetic construct
  misc_feature 1..336: note = Description of Artificial Sequence: Synthetic polynucleotide
  source 1..336: mol_type = other DNA
agagtgaagttcagcaggagcgcagacgcccccgcgtaccagcagggccagaaccagctctataacgagctcaatctaggacgaagagaggagtacgatgttttggacaagagacgtggccgggaccctgagatggggggaaagccgagaaggaagaaccctcaggaaggcctgtacaatgaactgcagaaagataagatggcggaggcctacagtgagattgggatgaaaggcgagcgccggaggggcaaggggcacgatggcctttaccagggtctcagtacagccaccaaggacacctacgacgcccttcacatgcaagctcttccacctcgt

SEQ ID NO: 427 - protein, 112 aa, synthetic construct; identical to SEQ ID NO: 161
  REGION 1..112: note = Description of Artificial Sequence: Synthetic polypeptide

SEQ ID NO: 428-429 - skipped (2 entries)

SEQ ID NO: 430 - DNA, 261 bp, synthetic construct
  misc_feature 1..261: note = Description of Artificial Sequence: Synthetic polynucleotide
  source 1..261: mol_type = other DNA
tggcacgaaggcctggaagaggcctcaagactttactttggtgaacgcaacgttaaaggcatgttcgaggtgctggaacccttgcatgcaatgatggagcgaggtcctcagacactcaaagagacatcttttaaccaggcgtatggacgggacctcatggaggctcaggaatggtgccgcaagtacatgaaaagtgggaatgtgaaggatctgctgcaagcatgggatctgtattaccacgtgtttagacggatcagcaaa

SEQ ID NO: 431 - protein, 87 aa, synthetic construct
  REGION 1..87: note = Description of Artificial Sequence: Synthetic polypeptide
WHEGLEEASRLYFGERNVKGMFEVLEPLHAMMERGPQTLKETSFNQAYGRDLMEAQEWCRKYMKSGNVKDLLQAWDLYYHVFRRISK

SEQ ID NO: 432-433 - skipped (2 entries)

SEQ ID NO: 434 - DNA, 264 bp, synthetic construct
  misc_feature 1..264: note = Description of Artificial Sequence: Synthetic polynucleotide
  source 1..264: mol_type = other DNA
tggcatgaagggttggaagaagcttcaaggctgtacttcggagagaggaacgtgaagggcatgtttgaggttcttgaacctctgcacgccatgatggaacggggaccgcagacactgaaagaaacctcttttaatcaggcctacggcagagacctgatggaggcccaagaatggtgtagaaagtatatgaaatccggtaacgtgaaagacctgctccaggcctgggacctttattaccatgtgttcaggcggatcagtaagtaa

SEQ ID NO: 435 - protein, 87 aa, synthetic construct; identical to SEQ ID NO: 431
  REGION 1..87: note = Description of Artificial Sequence: Synthetic polypeptide

SEQ ID NO: 436 - DNA, 324 bp, synthetic construct; identical to SEQ ID NO: 393
  misc_feature 1..324: note = Description of Artificial Sequence: Synthetic polynucleotide
  source 1..324: mol_type = other DNA

SEQ ID NO: 437 - protein, 108 aa, synthetic construct; identical to SEQ ID NO: 394
  REGION 1..108: note = Description of Artificial Sequence: Synthetic polypeptide

SEQ ID NO: 438 - DNA, 18 bp, synthetic construct
  misc_feature 1..18: note = Description of Artificial Sequence: Synthetic oligonucleotide
  source 1..18: mol_type = other DNA
agcggaggaggatccgga

SEQ ID NO: 439 - protein, 6 aa, synthetic construct
  REGION 1..6: note = Description of Artificial Sequence: Synthetic peptide
SGGGSG

SEQ ID NO: 440 - DNA, 864 bp, synthetic construct; identical to SEQ ID NO: 46
  misc_feature 1..864: note = Description of Artificial Sequence: Synthetic polynucleotide
  source 1..864: mol_type = other DNA

SEQ ID NO: 441 - protein, 288 aa, synthetic construct; identical to SEQ ID NO: 45
  REGION 1..288: note = Description of Artificial Sequence: Synthetic polypeptide

SEQ ID NO: 442-443 - skipped (2 entries)

SEQ ID NO: 444 - DNA, 54 bp, synthetic construct; identical to SEQ ID NO: 313
  misc_feature 1..54: note = Description of Artificial Sequence: Synthetic oligonucleotide
  source 1..54: mol_type = other DNA

SEQ ID NO: 445 - protein, 18 aa, synthetic construct
  REGION 1..18: note = Description of Artificial Sequence: Synthetic peptide
EGRGSLLTCGDVEENPGP

SEQ ID NO: 446 - DNA, 12 bp, synthetic construct
  misc_feature 1..12: note = Description of Artificial Sequence: Synthetic oligonucleotide
  source 1..12: mol_type = other DNA
gcatgcgccacc

SEQ ID NO: 447 - protein, 4 aa, synthetic construct
  REGION 1..4: note = Description of Artificial Sequence: Synthetic peptide
ACAT

SEQ ID NO: 448 - DNA, 63 bp, synthetic construct
  misc_feature 1..63: note = Description of Artificial Sequence: Synthetic oligonucleotide
  source 1..63: mol_type = other DNA
atggagtttgggttgtcatggttgtttctcgtcgctattctcaaaggtgtacaatgctcccgc

SEQ ID NO: 449 - protein, 21 aa, synthetic construct
  REGION 1..21: note = Description of Artificial Sequence: Synthetic peptide
MEFGLSWLFLVAILKGVQCSR

SEQ ID NO: 450 - DNA, 357 bp, synthetic construct; identical to SEQ ID NO: 168
  misc_feature 1..357: note = Description of Artificial Sequence: Synthetic polynucleotide
  source 1..357: mol_type = other DNA

SEQ ID NO: 451 - protein, 119 aa, synthetic construct; identical to SEQ ID NO: 169
  REGION 1..119: note = Description of Artificial Sequence: Synthetic polypeptide

SEQ ID NO: 452 - DNA, 45 bp, synthetic construct
  misc_feature 1..45: note = Description of Artificial Sequence: Synthetic oligonucleotide
  source 1..45: mol_type = other DNA
ggcggtggaggctccggtggaggcggctctggaggaggaggttca

SEQ ID NO: 453 - protein, 15 aa, synthetic construct
  REGION 1..15: note = Description of Artificial Sequence: Synthetic peptide
GGGGSGGGGSGGGGS

SEQ ID NO: 454 - DNA, 327 bp, synthetic construct; identical to SEQ ID NO: 164
  misc_feature 1..327: note = Description of Artificial Sequence: Synthetic polynucleotide
  source 1..327: mol_type = other DNA

SEQ ID NO: 455 - protein, 109 aa, synthetic construct; identical to SEQ ID NO: 165
  REGION 1..109: note = Description of Artificial Sequence: Synthetic polypeptide

SEQ ID NO: 456-457 - skipped (2 entries)

SEQ ID NO: 458 - DNA, 48 bp, synthetic construct; identical to SEQ ID NO: 152
  misc_feature 1..48: note = Description of Artificial Sequence: Synthetic oligonucleotide
  source 1..48: mol_type = other DNA

SEQ ID NO: 459 - protein, 16 aa, synthetic construct
  REGION 1..16: note = Description of Artificial Sequence: Synthetic peptide
ELPTQGTFSNVSTNVS

SEQ ID NO: 460 - DNA, 126 bp, synthetic construct; identical to SEQ ID NO: 154
  misc_feature 1..126: note = Description of Artificial Sequence: Synthetic polynucleotide
  source 1..126: mol_type = other DNA

SEQ ID NO: 461 - protein, 42 aa, synthetic construct; identical to SEQ ID NO: 155
  REGION 1..42: note = Description of Artificial Sequence: Synthetic polypeptide

SEQ ID NO: 462 - DNA, 111 bp, synthetic construct; identical to SEQ ID NO: 156
  misc_feature 1..111: note = Description of Artificial Sequence: Synthetic polynucleotide
  source 1..111: mol_type = other DNA

SEQ ID NO: 463 - protein, 37 aa, synthetic construct; identical to SEQ ID NO: 157
  REGION 1..37: note = Description of Artificial Sequence: Synthetic polypeptide

SEQ ID NO: 464-465 - skipped (2 entries)

SEQ ID NO: 466 - DNA, 516 bp, synthetic construct; identical to SEQ ID NO: 239
  misc_feature 1..516: note = Description of Artificial Sequence: Synthetic polynucleotide
  source 1..516: mol_type = other DNA

SEQ ID NO: 467 - protein, 172 aa, synthetic construct; identical to SEQ ID NO: 240
  REGION 1..172: note = Description of Artificial Sequence: Synthetic polypeptide

SEQ ID NO: 468 - DNA, 186 bp, synthetic construct; identical to SEQ ID NO: 241
  misc_feature 1..186: note = Description of Artificial Sequence: Synthetic polynucleotide
  source 1..186: mol_type = other DNA

SEQ ID NO: 469 - protein, 62 aa, synthetic construct; identical to SEQ ID NO: 216
  REGION 1..62: note = Description of Artificial Sequence: Synthetic polypeptide

SEQ ID NO: 470 - DNA, 336 bp, synthetic construct; identical to SEQ ID NO: 426
  misc_feature 1..336: note = Description of Artificial Sequence: Synthetic polynucleotide
  source 1..336: mol_type = other DNA

SEQ ID NO: 471 - protein, 112 aa, synthetic construct; identical to SEQ ID NO: 161
  REGION 1..112: note = Description of Artificial Sequence: Synthetic polypeptide

SEQ ID NO: 472-473 - skipped (2 entries)

SEQ ID NO: 474 - DNA, 261 bp, synthetic construct; identical to SEQ ID NO: 430
  misc_feature 1..261: note = Description of Artificial Sequence: Synthetic polynucleotide
  source 1..261: mol_type = other DNA

SEQ ID NO: 475 - protein, 87 aa, synthetic construct; identical to SEQ ID NO: 431
  REGION 1..87: note = Description of Artificial Sequence: Synthetic polypeptide

SEQ ID NO: 476-477 - skipped (2 entries)

SEQ ID NO: 478 - DNA, 264 bp, synthetic construct; identical to SEQ ID NO: 434
  misc_feature 1..264: note = Description of Artificial Sequence: Synthetic polynucleotide
  source 1..264: mol_type = other DNA

SEQ ID NO: 479 - protein, 87 aa, synthetic construct; identical to SEQ ID NO: 431
  REGION 1..87: note = Description of Artificial Sequence: Synthetic polypeptide

SEQ ID NO: 480 - skipped

SEQ ID NO: 481 - DNA, 324 bp, synthetic construct; identical to SEQ ID NO: 393
  misc_feature 1..324: note = Description of Artificial Sequence: Synthetic polynucleotide
  source 1..324: mol_type = other DNA

SEQ ID NO: 482 - protein, 108 aa, synthetic construct; identical to SEQ ID NO: 394
  REGION 1..108: note = Description of Artificial Sequence: Synthetic polypeptide

SEQ ID NO: 483 - DNA, 18 bp, synthetic construct
  misc_feature 1..18: note = Description of Artificial Sequence: Synthetic oligonucleotide
  source 1..18: mol_type = other DNA
agcggaggaggatccgga

SEQ ID NO: 484 - protein, 6 aa, synthetic construct
  REGION 1..6: note = Description of Artificial Sequence: Synthetic peptide
SGGGSG

SEQ ID NO: 485 - DNA, 864 bp, synthetic construct; identical to SEQ ID NO: 46
  misc_feature 1..864: note = Description of Artificial Sequence: Synthetic polynucleotide
  source 1..864: mol_type = other DNA

SEQ ID NO: 486 - protein, 288 aa, synthetic construct; identical to SEQ ID NO: 45
  REGION 1..288: note = Description of Artificial Sequence: Synthetic polypeptide

SEQ ID NO: 487-488 - skipped (2 entries)

SEQ ID NO: 489 - DNA, 54 bp, synthetic construct; identical to SEQ ID NO: 313
  misc_feature 1..54: note = Description of Artificial Sequence: Synthetic oligonucleotide
  source 1..54: mol_type = other DNA

SEQ ID NO: 490 - protein, 18 aa, synthetic construct
  REGION 1..18: note = Description of Artificial Sequence: Synthetic peptide
EGRGSLLTCGDVEENPGP

SEQ ID NO: 491 - DNA, 12 bp, synthetic construct
  misc_feature 1..12: note = Description of Artificial Sequence: Synthetic oligonucleotide
  source 1..12: mol_type = other DNA
gcatgcgccacc

SEQ ID NO: 492 - protein, 4 aa, synthetic construct
  REGION 1..4: note = Description of Artificial Sequence: Synthetic peptide
ACAT

SEQ ID NO: 493 - DNA, 63 bp, synthetic construct; identical to SEQ ID NO: 448
  misc_feature 1..63: note = Description of Artificial Sequence: Synthetic oligonucleotide
  source 1..63: mol_type = other DNA

SEQ ID NO: 494 - protein, 21 aa, synthetic construct
  REGION 1..21: note = Description of Artificial Sequence: Synthetic peptide
MEFGLSWLFLVAILKGVQCSR

SEQ ID NO: 495 - DNA, 357 bp, synthetic construct; identical to SEQ ID NO: 168
  misc_feature 1..357: note = Description of Artificial Sequence: Synthetic polynucleotide
  source 1..357: mol_type = other DNA

SEQ ID NO: 496 - protein, 119 aa, synthetic construct; identical to SEQ ID NO: 169
  REGION 1..119: note = Description of Artificial Sequence: Synthetic polypeptide

SEQ ID NO: 497 - DNA, 45 bp, synthetic construct; identical to SEQ ID NO: 452
  misc_feature 1..45: note = Description of Artificial Sequence: Synthetic oligonucleotide
  source 1..45: mol_type = other DNA

SEQ ID NO: 498 - protein, 15 aa, synthetic construct
  REGION 1..15: note = Description of Artificial Sequence: Synthetic peptide
GGGGSGGGGSGGGGS

SEQ ID NO: 499 - DNA, 327 bp, synthetic construct; identical to SEQ ID NO: 164
  misc_feature 1..327: note = Description of Artificial Sequence: Synthetic polynucleotide
  source 1..327: mol_type = other DNA

SEQ ID NO: 500 - protein, 109 aa, synthetic construct; identical to SEQ ID NO: 165
  REGION 1..109: note = Description of Artificial Sequence: Synthetic polypeptide

SEQ ID NO: 501-502 - skipped (2 entries)

SEQ ID NO: 503 - DNA, 48 bp, synthetic construct; identical to SEQ ID NO: 152
  misc_feature 1..48: note = Description of Artificial Sequence: Synthetic oligonucleotide
  source 1..48: mol_type = other DNA

SEQ ID NO: 504 - protein, 16 aa, synthetic construct
  REGION 1..16: note = Description of Artificial Sequence: Synthetic peptide
ELPTQGTFSNVSTNVS

SEQ ID NO: 505 - DNA, 126 bp, synthetic construct; identical to SEQ ID NO: 154
  misc_feature 1..126: note = Description of Artificial Sequence: Synthetic polynucleotide
  source 1..126: mol_type = other DNA

SEQ ID NO: 506 - protein, 42 aa, synthetic construct; identical to SEQ ID NO: 155
  REGION 1..42: note = Description of Artificial Sequence: Synthetic polypeptide

SEQ ID NO: 507 - DNA, 111 bp, synthetic construct; identical to SEQ ID NO: 156
  misc_feature 1..111: note = Description of Artificial Sequence: Synthetic polynucleotide
  source 1..111: mol_type = other DNA

SEQ ID NO: 508 - protein, 37 aa, synthetic construct; identical to SEQ ID NO: 157
  REGION 1..37: note = Description of Artificial Sequence: Synthetic polypeptide

SEQ ID NO: 509-510 - skipped (2 entries)

SEQ ID NO: 511 - DNA, 516 bp, synthetic construct; identical to SEQ ID NO: 239
  misc_feature 1..516: note = Description of Artificial Sequence: Synthetic polynucleotide
  source 1..516: mol_type = other DNA

SEQ ID NO: 512 - protein, 172 aa, synthetic construct; identical to SEQ ID NO: 240
  REGION 1..172: note = Description of Artificial Sequence: Synthetic polypeptide

SEQ ID NO: 513 - DNA, 186 bp, synthetic construct; identical to SEQ ID NO: 241
  misc_feature 1..186: note = Description of Artificial Sequence: Synthetic polynucleotide
  source 1..186: mol_type = other DNA

SEQ ID NO: 514 - protein, 62 aa, synthetic construct; identical to SEQ ID NO: 216
  REGION 1..62: note = Description of Artificial Sequence: Synthetic polypeptide

SEQ ID NO: 515 - DNA, 339 bp, synthetic construct
  misc_feature 1..339: note = Description of Artificial Sequence: Synthetic polynucleotide
  source 1..339: mol_type = other DNA
agagtgaagttcagcaggagcgcagacgcccccgcgtaccagcagggccagaaccagctctataacgagctcaatctaggacgaagagaggagtacgatgttttggacaagagacgtggccgggaccctgagatggggggaaagccgagaaggaagaaccctcaggaaggcctgtacaatgaactgcagaaagataagatggcggaggcctacagtgagattgggatgaaaggcgagcgccggaggggcaaggggcacgatggcctttaccagggtctcagtacagccaccaaggacacctacgacgcccttcacatgcaagctcttccacctcgttga

SEQ ID NO: 516 - protein, 112 aa, synthetic construct; identical to SEQ ID NO: 161
  REGION 1..112: note = Description of Artificial Sequence: Synthetic polypeptide

SEQ ID NO: 517-518 - skipped (2 entries)

SEQ ID NO: 519 - DNA, 320 bp, synthetic construct
  misc_feature 1..320: note = Description of Artificial Sequence: Synthetic polynucleotide
  source 1..320: mol_type = other DNA
ggagtgcaggtggagactatctccccaggagacgggcgcaccttccccaagcgcggccagacctgcgtggtgcactacaccgggatgcttgaagatggaaagaaagttgattcctcccgggacagaaacaagccctttaagtttatgctaggcaagcaggaggtgatccgaggctgggaagaaggggttgcccagatgagtgtgggtcagagagccaaactgactatatctccagattatgcctatggtgccactgggcacccaggcatcatcccaccacatgccactctcgtcttcgatgtggagcttctaaaactgga

SEQ ID NO: 520 - protein, 106 aa, synthetic construct
  REGION 1..106: note = Description of Artificial Sequence: Synthetic polypeptide
GVQVETISPGDGRTFPKRGQTCVVHYTGMLEDGKKVDSSRDRNKPFKFMLGKQEVIRGWEEGVAQMSVGQRAKLTISPDYAYGATGHPGIIPPHATLVFDVELLKL

SEQ ID NO: 521 - DNA, 19 bp, synthetic construct
  misc_feature 1..19: note = Description of Artificial Sequence: Synthetic oligonucleotide
  source 1..19: mol_type = other DNA
atctggcggtggatccgga

SEQ ID NO: 522 - protein, 6 aa, synthetic construct
  REGION 1..6: note = Description of Artificial Sequence: Synthetic peptide
SGGGSG

SEQ ID NO: 523 - DNA, 921 bp, synthetic construct
  misc_feature 1..921: note = Description of Artificial Sequence: Synthetic polynucleotide
  source 1..921: mol_type = other DNA
gtcgacggatttggtgatgtcggtgctcttgagagtttgaggggaaatgcagatttggcttacatcctgagcatggagccctgtggccactgcctcattatcaacaatgtgaacttctgccgtgagtccgggctccgcacccgcactggctccaacatcgactgtgagaagttgcggcgtcgcttctcctcgctgcatttcatggtggaggtgaagggcgacctgactgccaagaaaatggtgctggctttgctggagctggcgcggcaggaccacggtgctctggactgctgcgtggtggtcattctctctcacggctgtcaggccagccacctgcagttcccaggggctgtctacggcacagatggatgccctgtgtcggtcgagaagattgtgaacatcttcaatgggaccagctgccccagcctgggagggaagcccaagctctttttcatccaggcctgtggtggggagcagaaagaccatgggtttgaggtggcctccacttcccctgaagacgagtcccctggcagtaaccccgagccagatgccaccccgttccaggaaggtttgaggaccttcgaccagctggacgccatatctagtttgcccacacccagtgacatctttgtgtcctactctactttcccaggttttgtttcctggagggaccccaagagtggctcctggtacgttgagaccctggacgacatctttgagcagtgggctcactctgaagacctgcagtccctcctgcttagggtcgctaatgctgtttcggtgaaagggatttataaacagatgcctggttgctttaatttcctccggaaaaaacttttctttaaaacatcagctagcagagccgagggcaggggaagtcttctaacatgcggggacgtggaggaaaatcccgggccctga

SEQ ID NO: 524 - protein, 284 aa, synthetic construct
  REGION 1..284: note = Description of Artificial Sequence: Synthetic polypeptide
VDGFGDVGALESLRGNADLAYILSMEPCGHCLIINNVNFCRESGLRTRTGSNIDCEKLRRRFSSLHFMVEVKGDLTAKKMVLALLELARQDHGALDCCVVVILSHGCQASHLQFPGAVYGTDGCPVSVEKIVNIFNGTSCPSLGGKPKLFFIQACGGEQKDHGFEVASTSPEDESPGSNPEPDATPFQEGLRTFDQLDAISSLPTPSDIFVSYSTFPGFVSWRDPKSGSWYVETLDDIFEQWAHSEDLQSLLLRVANAVSVKGIYKQMPGCFNFLRKKLFFKTS

SEQ ID NO: 525 - DNA, 12 bp, synthetic construct
  misc_feature 1..12: note = Description of Artificial Sequence: Synthetic oligonucleotide
  source 1..12: mol_type = other DNA
gctagcagagcc

SEQ ID NO: 526 - protein, 4 aa, synthetic construct
  REGION 1..4: note = Description of Artificial Sequence: Synthetic peptide
ASRA

SEQ ID NO: 527 - DNA, 57 bp, synthetic construct
  misc_feature 1..57: note = Description of Artificial Sequence: Synthetic oligonucleotide
  source 1..57: mol_type = other DNA
gagggcaggggaagtcttctaacatgcggggacgtggaggaaaatcccgggccctga

SEQ ID NO: 528 - protein, 18 aa, synthetic construct
  REGION 1..18: note = Description of Artificial Sequence: Synthetic peptide
EGRGSLLTCGDVEENPGP

SEQ ID NO: 529-530 - skipped (2 entries)

SEQ ID NO: 531 - DNA, 261 bp, synthetic construct
  misc_feature 1..261: note = Description of Artificial Sequence: Synthetic polynucleotide
  source 1..261: mol_type = other DNA
tggcatgaagggttggaagaagcttcaaggctgtacttcggagagaggaacgtgaagggcatgtttgaggttcttgaacctctgcacgccatgatggaacggggaccgcagacactgaaagaaacctcttttaatcaggcctacggcagagacctgatggaggcccaagaatggtgtagaaagtatatgaaatccggtaacgtgaaagacctgctccaggcctgggacctttattaccatgtgttcaggcggatcagtaag

SEQ ID NO: 532 - protein, 107 aa, synthetic construct
  REGION 1..107: note = Description of Artificial Sequence: Synthetic polypeptide
GVQVETISPGDGRTFPKRGQTCVVHYTGMLEDGKKFDSSRDRNKPFKFMLGKQEVIRGWEEGVAQMSVGQRAKLTISPDYAYGATGHPPKIPPHATLVFDVELLKLE

SEQ ID NO: 533 - DNA, 24 bp, synthetic construct
  misc_feature 1..24: note = Description of Artificial Sequence: Synthetic oligonucleotide
  source 1..24: mol_type = other DNA
tcaggcggtggctcaggtgtcgag

SEQ ID NO: 534 - protein, 8 aa, synthetic construct
  REGION 1..8: note = Description of Artificial Sequence: Synthetic peptide
SGGGSGVD

SEQ ID NO: 535 - DNA, 864 bp, synthetic construct; identical to SEQ ID NO: 44
  misc_feature 1..864: note = Description of Artificial Sequence: Synthetic polynucleotide
  source 1..864: mol_type = other DNA

SEQ ID NO: 536 - protein, 287 aa, synthetic construct
  REGION 1..287: note = Description of Artificial Sequence: Synthetic polypeptide
DGFGDVGALESLRGNADLAYILSMEPCGHCLIINNVNFCRESGLRTRTGSNIDCEKLRRRFSSLHFMVEVKGDLTAKKMVLALLELARQDHGALDCCVVVILSHGCQASHLQFPGAVYGTDGCPVSVEKIVNIFNGTSCPSLGGKPKLFFIQACGGEQKDHGFEVASTSPEDESPGSNPEPDATPFQEGLRTFDQLDAISSLPTPSDIFVSYSTFPGFVSWRDPKSGSWYVETLDDIFEQWAHSEDLQSLLLRVANAVSVKGIYKQMPGCFNFLRKKLFFKTSASRA

SEQ ID NO: 537 - DNA, 57 bp, synthetic construct; identical to SEQ ID NO: 527
  misc_feature 1..57: note = Description of Artificial Sequence: Synthetic oligonucleotide
  source 1..57: mol_type = other DNA

SEQ ID NO: 538 - protein, 18 aa, synthetic construct
  REGION 1..18: note = Description of Artificial Sequence: Synthetic peptide
EGRGSLLTCGDVEENPGP

SEQ ID NO: 539 - DNA, 270 bp, synthetic construct
  misc_feature 1..270: note = Description of Artificial Sequence: Synthetic polynucleotide
  source 1..270: mol_type = other DNA
atgctcgagtggcatgaaggcctggaagaggcatctcgtttgtactttggggaaaggaacgtgaaaggcatgtttgaggtgctggagcccttgcacgctatgatggaacggggcccccagactctgaaggaaacatcctttaatcaggcctatggtcgagatttaatggaggcccaagagtggtgcaggaagtacatgaaatcagggaatgtcaaggacctcctccaagcctgggacctctattatcatgtgttccgacgaatctcaaag

SEQ ID NO: 540 - protein, 90 aa, synthetic construct
  REGION 1..90: note = Description of Artificial Sequence: Synthetic polypeptide
MLEWHEGLEEASRLYFGERNVKGMFEVLEPLHAMMERGPQTLKETSFNQAYGRDLMEAQEWCRKYMKSGNVKDLLQAWDLYYHVFRRISK

SEQ ID NO: 541-542 - skipped (2 entries)

SEQ ID NO: 543 - DNA, 261 bp, synthetic construct; identical to SEQ ID NO: 531
  misc_feature 1..261: note = Description of Artificial Sequence: Synthetic polynucleotide
  source 1..261: mol_type = other DNA

SEQ ID NO: 544 - protein, 87 aa, synthetic construct; identical to SEQ ID NO: 431
  REGION 1..87: note = Description of Artificial Sequence: Synthetic polypeptide

SEQ ID NO: 545 - DNA, 24 bp, synthetic construct
  misc_feature 1..24: note = Description of Artificial Sequence: Synthetic oligonucleotide
  source 1..24: mol_type = other DNA
tcaggcggtggctcaggtgtcgag

SEQ ID NO: 546 - protein, 8 aa, synthetic construct
  REGION 1..8: note = Description of Artificial Sequence: Synthetic peptide
SGGGSGVD

SEQ ID NO: 547 - DNA, 261 bp, synthetic construct
  misc_feature 1..261: note = Description of Artificial Sequence: Synthetic polynucleotide
  source 1..261: mol_type = other DNA
tggcatgaaggcctggaagaggcatctcgtttgtactttggggaaaggaacgtgaaaggcatgtttgaggtgctggagcccttgcacgctatgatggaacggggcccccagactctgaaggaaacatcctttaatcaggcctatggtcgagatttaatggaggcccaagagtggtgcaggaagtacatgaaatcagggaatgtcaaggacctcctccaagcctgggacctctattatcatgtgttccgacgaatctcaaag

SEQ ID NO: 548 - protein, 87 aa, synthetic construct; identical to SEQ ID NO: 431
  REGION 1..87: note = Description of Artificial Sequence: Synthetic polypeptide

SEQ ID NO: 549-550 - skipped (2 entries)

SEQ ID NO: 551 - DNA, 285 bp, synthetic construct
  misc_feature 1..285: note = Description of Artificial Sequence: Synthetic polynucleotide
  source 1..285: mol_type = other DNA
tggcatgaagggttggaagaagcttcaaggctgtacttcggagagaggaacgtgaagggcatgtttgaggttcttgaacctctgcacgccatgatggaacggggaccgcagacactgaaagaaacctcttttaatcaggcctacggcagagacctgatggaggcccaagaatggtgtagaaagtatatgaaatccggtaacgtgaaagacctgctccaggcctgggacctttattaccatgtgttcaggcggatcagtaagtcaggcggtggctcaggtgtcgac

SEQ ID NO: 552 - protein, 87 aa, synthetic construct; identical to SEQ ID NO: 431
  REGION 1..87: note = Description of Artificial Sequence: Synthetic polypeptide

SEQ ID NO: 553-554 - skipped (2 entries)

SEQ ID NO: 555 - DNA, 36 bp, synthetic construct
  misc_feature 1..36: note = Description of Artificial Sequence: Synthetic oligonucleotide
  source 1..36: mol_type = other DNA
tatccgtacgacgtaccagactacgcactcgactaa

SEQ ID NO: 556 - protein, 11 aa, synthetic construct
  REGION 1..11: note = Description of Artificial Sequence: Synthetic peptide
YPYDVPDYALD

SEQ ID NO: 557 - DNA, 51 bp, synthetic construct
  misc_feature 1..51: note = Description of Artificial Sequence: Synthetic oligonucleotide
  source 1..51: mol_type = other DNA
atgggctgtgtgcaatgtaaggataaagaagcaacaaaactgacggaggag

SEQ ID NO: 558 - protein, 17 aa, synthetic construct
  REGION 1..17: note = Description of Artificial Sequence: Synthetic peptide
MGCVQCKDKEATKLTEE

SEQ ID NO: 559-560 - skipped (2 entries)

SEQ ID NO: 561 - DNA, 261 bp, synthetic construct; identical to SEQ ID NO: 547
  misc_feature 1..261: note = Description of Artificial Sequence: Synthetic polynucleotide
  source 1..261: mol_type = other DNA

SEQ ID NO: 562 - protein, 90 aa, synthetic construct; identical to SEQ ID NO: 540
  REGION 1..90: note = Description of Artificial Sequence: Synthetic polypeptide

SEQ ID NO: 563-564 - skipped (2 entries)

SEQ ID NO: 565 - DNA, 261 bp, synthetic construct; identical to SEQ ID NO: 531
  misc_feature 1..261: note = Description of Artificial Sequence: Synthetic polynucleotide
  source 1..261: mol_type = other DNA

SEQ ID NO: 566 - protein, 87 aa, synthetic construct; identical to SEQ ID NO: 431
  REGION 1..87: note = Description of Artificial Sequence: Synthetic polypeptide

SEQ ID NO: 567 - DNA, 19 bp, synthetic construct
  misc_feature 1..19: note = Description of Artificial Sequence: Synthetic oligonucleotide
  source 1..19: mol_type = other DNA
tcaggcggtggctcaggtg

SEQ ID NO: 568 - protein, 8 aa, synthetic construct
  REGION 1..8: note = Description of Artificial Sequence: Synthetic peptide
SGGGSGVD

SEQ ID NO: 569 - DNA, 36 bp, synthetic construct; identical to SEQ ID NO: 555
  misc_feature 1..36: note = Description of Artificial Sequence: Synthetic oligonucleotide
  source 1..36: mol_type = other DNA

SEQ ID NO: 570 - protein, 11 aa, synthetic construct
  REGION 1..11: note = Description of Artificial Sequence: Synthetic peptide
YPYDVPDYALD

SEQ ID NO: 571-572 - skipped (2 entries)

SEQ ID NO: 573 - DNA, 321 bp, synthetic construct
  misc_feature 1..321: note = Description of Artificial Sequence: Synthetic polynucleotide
  source 1..321: mol_type = other DNA
ggcgtccaagtcgaaaccattagtcccggcgatggcagaacatttcctaaaaggggacaaacatgtgtcgtccattatacaggcatgttggaggacggcaaaaagttcgacagtagtagagatcgcaataaacctttcaaattcatgttgggaaaacaagaagtcattaggggatgggaggagggcgtggctcaaatgtccgtcggccaacgcgctaagctcaccatcagccccgactacgcatacggcgctaccggacatccccctaagattccccctcacgctaccttggtgtttgacgtcgaactgttgaagctcgaa

SEQ ID NO: 574 - protein, 107 aa, synthetic construct; identical to SEQ ID NO: 532
  REGION 1..107: note = Description of Artificial Sequence: Synthetic polypeptide

SEQ ID NO: 575-576 - skipped (2 entries)

SEQ ID NO: 577 - DNA, 321 bp, synthetic construct
  misc_feature 1..321: note = Description of Artificial Sequence: Synthetic polynucleotide
  source 1..321: mol_type = other DNA
ggagtgcaggtggagactatctccccaggagacgggcgcaccttccccaagcgcggccagacctgcgtggtgcactacaccgggatgcttgaagatggaaagaaattcgattcctctcgggacagaaacaagccctttaagtttatgctaggcaagcaggaggtgatccgaggctgggaagaaggggttgcccagatgagtgtgggtcagagagccaaactgactatatctccagattatgcctatggtgccactgggcacccacctaagatcccaccacatgccactctcgtcttcgatgtggagcttctaaaactggaa

SEQ ID NO: 578 - protein, 107 aa, synthetic construct; identical to SEQ ID NO: 532
  REGION 1..107: note = Description of Artificial Sequence: Synthetic polypeptide

SEQ ID NO: 579 - DNA, 24 bp, synthetic construct
  misc_feature 1..24: note = Description of Artificial Sequence: Synthetic oligonucleotide
  source 1..24: mol_type = other DNA
tcaggcggtggctcaggtgtcgag

SEQ ID NO: 580 - protein, 8 aa, synthetic construct
  REGION 1..8: note = Description of Artificial Sequence: Synthetic peptide
SGGGSGVD

SEQ ID NO: 581 - DNA, 321 bp, synthetic construct; identical to SEQ ID NO: 573
  misc_feature 1..321: note = Description of Artificial Sequence: Synthetic polynucleotide
  source 1..321: mol_type = other DNA

SEQ ID NO: 582 - protein, 107 aa, synthetic construct; identical to SEQ ID NO: 532
  REGION 1..107: note = Description of Artificial Sequence: Synthetic polypeptide

SEQ ID NO: 583-584 - skipped (2 entries)

SEQ ID NO: 585 - DNA, 321 bp, synthetic construct; identical to SEQ ID NO: 577
  misc_feature 1..321: note = Description of Artificial Sequence: Synthetic polynucleotide
  source 1..321: mol_type = other DNA

SEQ ID NO: 586 - protein, 107 aa, synthetic construct; identical to SEQ ID NO: 532
  REGION 1..107: note = Description of Artificial Sequence: Synthetic polypeptide

SEQ ID NO: 587 - DNA, 24 bp, synthetic construct
  misc_feature 1..24: note = Description of Artificial Sequence: Synthetic oligonucleotide
  source 1..24: mol_type = other DNA
tcaggcggtggctcaggtgtcgag

SEQ ID NO: 588 - protein, 8 aa, synthetic construct
  REGION 1..8: note = Description of Artificial Sequence: Synthetic peptide
SGGGSGVD

SEQ ID NO: 589 - DNA, 36 bp, synthetic construct; identical to SEQ ID NO: 555
  misc_feature 1..36: note = Description of Artificial Sequence: Synthetic oligonucleotide
  source 1..36: mol_type = other DNA

SEQ ID NO: 590 - protein, 11 aa, synthetic construct
  REGION 1..11: note = Description of Artificial Sequence: Synthetic peptide
YPYDVPDYALD

SEQ ID NO: 591 - DNA, 330 bp, synthetic construct
  misc_feature 1..330: note = Description of Artificial Sequence: Synthetic polynucleotide
  source 1..330: mol_type = other DNA
atgctcgagggagtgcaggtggagactatctccccaggagacgggcgcaccttccccaagcgcggccagacctgcgtggtgcactacaccgggatgcttgaagatggaaagaaagttgattcctcccgggacagaaacaagccctttaagtttatgctaggcaagcaggaggtgatccgaggctgggaagaaggggttgcccagatgagtgtgggtcagagagccaaactgactatatctccagattatgcctatggtgccactgggcacccaggcatcatcccaccacatgccactctcgtcttcgatgtggagcttctaaaactggaa

SEQ ID NO: 592 - protein, 110 aa, synthetic construct; identical to SEQ ID NO: 36
  REGION 1..110: note = Description of Artificial Sequence: Synthetic polypeptide

SEQ ID NO: 593 - DNA, 18 bp, synthetic construct
  misc_feature 1..18: note = Description of Artificial Sequence: Synthetic oligonucleotide
  source 1..18: mol_type = other DNA
tctggcggtggatccgga

SEQ ID NO: 594 - protein, 6 aa, synthetic construct
  REGION 1..6: note = Description of Artificial Sequence: Synthetic peptide
SGGGSG

SEQ ID NO: 595 - DNA, 864 bp, synthetic construct; identical to SEQ ID NO: 44
  misc_feature 1..864: note = Description of Artificial Sequence: Synthetic polynucleotide
  source 1..864: mol_type = other DNA

SEQ ID NO: 596 - protein, 288 aa, synthetic construct; identical to SEQ ID NO: 45
  REGION 1..288: note = Description of Artificial Sequence: Synthetic polypeptide

SEQ ID NO: 597 - DNA, 54 bp, synthetic construct; identical to SEQ ID NO: 313
  misc_feature 1..54: note = Description of Artificial Sequence: Synthetic oligonucleotide
  source 1..54: mol_type = other DNA

SEQ ID NO: 598 - protein, 18 aa, synthetic construct
  REGION 1..18: note = Description of Artificial Sequence: Synthetic peptide
EGRGSLLTCGDVEENPGP

SEQ ID NO: 599 - DNA, 1002 bp, synthetic construct
  misc_feature 1..1002: note = Description of Artificial Sequence: Synthetic polynucleotide
  source 1..1002: mol_type = other DNA
atgccacctcctcgcctcctcttcttcctcctcttcctcacccccatggaagtcaggcccgaggaacctctagtggtgaaggtggaagagggagataacgctgtgctgcagtgcctcaaggggacctcagatggccccactcagcagctgacctggtctcgggagtccccgcttaaacccttcttaaaactcagcctggggctgccaggcctgggaatccacatgaggcccctggccatctggcttttcatcttcaacgtctctcaacagatggggggcttctacctgtgccagccggggcccccctctgagaaggcctggcagcctggctggacagtcaatgtggagggcagcggggagctgttccggtggaatgtttcggacctaggtggcctgggctgtggcctgaagaacaggtcctcagagggccccagctccccttccgggaagctcatgagccccaagctgtatgtgtgggccaaagaccgccctgagatctgggagggagagcctccgtgtctcccaccgagggacagcctgaaccagagcctcagccaggacctcaccatggcccctggctccacactctggctgtcctgtggggtaccccctgactctgtgtccaggggccccctctcctggacccatgtgcaccccaaggggcctaagtcattgctgagcctagagctgaaggacgatcgcccggccagagatatgtgggtaatggagacgggtctgttgttgccccgggccacagctcaagacgctggaaagtattattgtcaccgtggcaacctgaccatgtcattccacctggagatcactgctcggccagtactatggcactggctgctgaggactggtggctggaaggtctcagctgtgactttggcttatctgatcttctgcctgtgttcccttgtgggcattcttcatcttcaaagagccctggtcctgaggaggaaaagaaagcgaatgactgaccccaccaggagattctaa

SEQ ID NO: 600 - protein, 333 aa, synthetic construct; identical to SEQ ID NO: 15
  REGION 1..333: note = Description of Artificial Sequence: Synthetic polypeptide

SEQ ID NO: 601 - DNA, 330 bp, synthetic construct; identical to SEQ ID NO: 591
  misc_feature 1..330: note = Description of Artificial Sequence: Synthetic polynucleotide
  source 1..330: mol_type = other DNA

SEQ ID NO: 602 - protein, 110 aa, synthetic construct; identical to SEQ ID NO: 36
  REGION 1..110: note = Description of Artificial Sequence: Synthetic polypeptide

SEQ ID NO: 603 - DNA, 18 bp, synthetic construct
  misc_feature 1..18: note = Description of Artificial Sequence: Synthetic oligonucleotide
  source 1..18: mol_type = other DNA
tctggcggtggatccgga

SEQ ID NO: 604 - protein, 6 aa, synthetic construct
  REGION 1..6: note = Description of Artificial Sequence: Synthetic peptide
SGGGSG

SEQ ID NO: 605 - DNA, 864 bp, synthetic construct; identical to SEQ ID NO: 44
  misc_feature 1..864: note = Description of Artificial Sequence: Synthetic polynucleotide
  source 1..864: mol_type = other DNA

SEQ ID NO: 606 - protein, 288 aa, synthetic construct; identical to SEQ ID NO: 45
  REGION 1..288: note = Description of Artificial Sequence: Synthetic polypeptide

SEQ ID NO: 607 - DNA, 54 bp, synthetic construct; identical to SEQ ID NO: 313
  misc_feature 1..54: note = Description of Artificial Sequence: Synthetic oligonucleotide
  source 1..54: mol_type = other DNA

SEQ ID NO: 608 - protein, 18 aa, synthetic construct
  REGION 1..18: note = Description of Artificial Sequence: Synthetic peptide
EGRGSLLTCGDVEENPGP

SEQ ID NO: 609 - DNA, 999 bp, synthetic construct; identical to SEQ ID NO: 14
  misc_feature 1..999: note = Description of Artificial Sequence: Synthetic polynucleotide
  source 1..999: mol_type = other DNA

SEQ ID NO: 610 - protein, 333 aa, synthetic construct; identical to SEQ ID NO: 15
  REGION 1..333: note = Description of Artificial Sequence: Synthetic polypeptide

SEQ ID NO: 611-612 - skipped (2 entries)

SEQ ID NO: 613 - DNA, 57 bp, synthetic construct
  misc_feature 1..57: note = Description of Artificial Sequence: Synthetic oligonucleotide
  source 1..57: mol_type = other DNA
gctacgaattttagcttgctgaagcaggccggtgatgtggaagagaaccccgggcct

SEQ ID NO: 614 - protein, 19 aa, synthetic construct
  REGION 1..19: note = Description of Artificial Sequence: Synthetic peptide
ATNFSLLKQAGDVEENPGP

SEQ ID NO: 615 - DNA, 264 bp, synthetic construct
  misc_feature 1..264: note = Description of Artificial Sequence: Synthetic polynucleotide
  source 1..264: mol_type = other DNA
tggcacgaaggtttggaagaggcctcccgcctgtatttcggtgagagaaatgtcaaaggtatgtttgaagtgcttgagcccctgcacgccatgatggaacgggggccgcagactctgaaagaaacctcattcaaccaggcatacgggcgagacctgatggaagcgcaggaatggtgtaggaagtacatgaagtccggaaatgtgaaggacttgctccaggcttgggacctgtactatcacgtatttcggagaataagcaagtaa

SEQ ID NO: 616 - protein, 87 aa, synthetic construct; identical to SEQ ID NO: 431
  REGION 1..87: note = Description of Artificial Sequence: Synthetic polypeptide

SEQ ID NO: 617 - DNA, 330 bp, synthetic construct; identical to SEQ ID NO: 591
  misc_feature 1..330: note = Description of Artificial Sequence: Synthetic polynucleotide
  source 1..330: mol_type = other DNA

SEQ ID NO: 618 - protein, 110 aa, synthetic construct; identical to SEQ ID NO: 36
  REGION 1..110: note = Description of Artificial Sequence: Synthetic polypeptide

SEQ ID NO: 619 - DNA, 18 bp, synthetic construct
  misc_feature 1..18: note = Description of Artificial Sequence: Synthetic oligonucleotide
  source 1..18: mol_type = other DNA
tctggcggtggatccgga

SEQ ID NO: 620 - protein, 6 aa, synthetic construct
  REGION 1..6: note = Description of Artificial Sequence: Synthetic peptide
SGGGSG

SEQ ID NO: 621 - DNA, 864 bp, synthetic construct; identical to SEQ ID NO: 44
  misc_feature 1..864: note = Description of Artificial Sequence: Synthetic polynucleotide
  source 1..864: mol_type = other DNA

SEQ ID NO: 622 - protein, 288 aa, synthetic construct; identical to SEQ ID NO: 45
  REGION 1..288: note = Description of Artificial Sequence: Synthetic polypeptide

SEQ ID NO: 623 - DNA, 54 bp, synthetic construct; identical to SEQ ID NO: 313
  misc_feature 1..54: note = Description of Artificial Sequence: Synthetic oligonucleotide
  source 1..54: mol_type = other DNA

SEQ ID NO: 624 - protein, 18 aa, synthetic construct
  REGION 1..18: note = Description of Artificial Sequence: Synthetic peptide
EGRGSLLTCGDVEENPGP

SEQ ID NO: 625 - DNA, 999 bp, synthetic construct; identical to SEQ ID NO: 14
  misc_feature 1..999: note = Description of Artificial Sequence: Synthetic polynucleotide
  source 1..999: mol_type = other DNA

SEQ ID NO: 626 - protein, 333 aa, synthetic construct; identical to SEQ ID NO: 15
  REGION 1..333: note = Description of Artificial Sequence: Synthetic polypeptide

SEQ ID NO: 627-628 - skipped (2 entries)

SEQ ID NO: 629 - DNA, 57 bp, synthetic construct; identical to SEQ ID NO: 613
  misc_feature 1..57: note = Description of Artificial Sequence: Synthetic oligonucleotide
  source 1..57: mol_type = other DNA

SEQ ID NO: 630 - protein, 19 aa, synthetic construct
  REGION 1..19: note = Description of Artificial Sequence: Synthetic peptide
ATNFSLLKQAGDVEENPGP

SEQ ID NO: 631 - DNA, 261 bp, synthetic construct
  misc_feature 1..261: note = Description of Artificial Sequence: Synthetic polynucleotide
  source 1..261: mol_type = other DNA
tggcatgaaggtctggaagaagcttctcgcctttattttggcgaacggaacgtaaaaggtatgtttgaagtcctggagccattgcacgccatgatggagcgcgggcctcagaccctcaaggaaaccagttttaatcaggcctatgggcgagacctcatggaggcacaggaatggtgtcggaagtatatgaagtccggcaacgttaaggatctcttgcaggcctgggacttgtattatcacgtgttccggcgaatcagcaag

SEQ ID NO: 632 - protein, 87 aa, synthetic construct; identical to SEQ ID NO: 431
  REGION 1..87: note = Description of Artificial Sequence: Synthetic polypeptide

SEQ ID NO: 633-634 - skipped (2 entries)

SEQ ID NO: 635 - DNA, 264 bp, synthetic construct; identical to SEQ ID NO: 615
  misc_feature 1..264: note = Description of Artificial Sequence: Synthetic polynucleotide
  source 1..264: mol_type = other DNA

SEQ ID NO: 636 - protein, 87 aa, synthetic construct; identical to SEQ ID NO: 431
  REGION 1..87: note = Description of Artificial Sequence: Synthetic polypeptide

SEQ ID NO: 637 - DNA, 330 bp, synthetic construct; identical to SEQ ID NO: 591
  misc_feature 1..330: note = Description of Artificial Sequence: Synthetic polynucleotide
  source 1..330: mol_type = other DNA

SEQ ID NO: 638 - protein, 110 aa, synthetic construct; identical to SEQ ID NO: 36
  REGION 1..110: note = Description of Artificial Sequence: Synthetic polypeptide

SEQ ID NO: 639 - DNA, 18 bp, synthetic construct
  misc_feature 1..18: note = Description of Artificial Sequence: Synthetic oligonucleotide
  source 1..18: mol_type = other DNA
tctggcggtggatccgga

SEQ ID NO: 640 - protein, 6 aa, synthetic construct
  REGION 1..6: note = Description of Artificial Sequence: Synthetic peptide
SGGGSG

SEQ ID NO: 641 - DNA, 864 bp, synthetic construct; identical to SEQ ID NO: 44
  misc_feature 1..864: note = Description of Artificial Sequence: Synthetic polynucleotide
  source 1..864: mol_type = other DNA

SEQ ID NO: 642 - protein, 288 aa, synthetic construct; identical to SEQ ID NO: 45
  REGION 1..288: note = Description of Artificial Sequence: Synthetic polypeptide

SEQ ID NO: 643 - DNA, 54 bp, synthetic construct; identical to SEQ ID NO: 313
  misc_feature 1..54: note = Description of Artificial Sequence: Synthetic oligonucleotide
  source 1..54: mol_type = other DNA

SEQ ID NO: 644 - protein, 18 aa, synthetic construct
  REGION 1..18: note = Description of Artificial Sequence: Synthetic peptide
EGRGSLLTCGDVEENPGP

SEQ ID NO: 645 - DNA, 999 bp, synthetic construct; identical to SEQ ID NO: 14
  misc_feature 1..999: note = Description of Artificial Sequence: Synthetic polynucleotide
  source 1..999: mol_type = other DNA

SEQ ID NO: 646 - protein, 333 aa, synthetic construct; identical to SEQ ID NO: 15
  REGION 1..333: note = Description of Artificial Sequence: Synthetic polypeptide

SEQ ID NO: 647-648 - skipped (2 entries)

SEQ ID NO: 649 - DNA, 57 bp, synthetic construct; identical to SEQ ID NO: 613
  misc_feature 1..57: note = Description of Artificial Sequence: Synthetic oligonucleotide
  source 1..57: mol_type = other DNA

SEQ ID NO: 650 - protein, 19 aa, synthetic construct
  REGION 1..19: note = Description of Artificial Sequence: Synthetic peptide
ATNFSLLKQAGDVEENPGP

SEQ ID NO: 651 - DNA, 261 bp, synthetic construct; identical to SEQ ID NO: 631
  misc_feature 1..261: note = Description of Artificial Sequence: Synthetic polynucleotide
  source 1..261: mol_type = other DNA

SEQ ID NO: 652 - protein, 87 aa, synthetic construct; identical to SEQ ID NO: 431
  REGION 1..87: note = Description of Artificial Sequence: Synthetic polypeptide

SEQ ID NO: 653-654 - skipped (2 entries)

SEQ ID NO: 655 - DNA, 261 bp, synthetic construct
  misc_feature 1..261: note = Description of Artificial Sequence: Synthetic polynucleotide
  source 1..261: mol_type = other DNA
tggcacgaaggtctggacgaggctagtagactgtatttcggcgagagaaatgtaaagggaatgttcgaggtactggagcctctgcacgccatgatggaacgcggccctcagacactcaaggagactagttttaaccaggcctatggcagggatctgatggaggctcaggaatggtgccggaagtatatgaaaagcggtaacgtgaaggacctgctgcaggcctgggatctgtattatcacgtgtttagaagaatctctaaa

SEQ ID NO: 656 - protein, 87 aa, synthetic construct
  REGION 1..87: note = Description of Artificial Sequence: Synthetic polypeptide
WHEGLDEASRLYFGERNVKGMFEVLEPLHAMMERGPQTLKETSFNQAYGRDLMEAQEWCRKYMKSGNVKDLLQAWDLYYHVFRRISK

SEQ ID NO: 657-658 - skipped (2 entries)

SEQ ID NO: 659 - DNA, 264 bp, synthetic construct; identical to SEQ ID NO: 615
  misc_feature 1..264: note = Description of Artificial Sequence: Synthetic polynucleotide
  source 1..264: mol_type = other DNA

SEQ ID NO: 660 - protein, 87 aa, synthetic construct; identical to SEQ ID NO: 431
  REGION 1..87: note = Description of Artificial Sequence: Synthetic polypeptide

SEQ ID NO: 661 - DNA, 261 bp, synthetic construct
  misc_feature 1..261: note = Description of Artificial Sequence: Synthetic polynucleotide
  source 1..261: mol_type = other DNA
tggcacgaggggctggaggaggcaagtcgactgtattttggagaacgcaacgtaaagggaatgtttgaggtgctcgaaccactccatgctatgatggaaagggggcctcagactcttaaggaaacaagttttaatcaagcctacggacgagacctcatggaggcgcaggagtggtgcagaaaatacatgaaatcaggtaatgttaaggacctgctgcaggcatgggacctgtactaccatgtcttcaggcgcatctcaaag

SEQ ID NO: 662 - protein, 87 aa, synthetic construct; identical to SEQ ID NO: 431
  REGION 1..87: note = Description of Artificial Sequence: Synthetic polypeptide

SEQ ID NO: 663 - DNA, 30 bp, synthetic construct
  misc_feature 1..30: note = Description of Artificial Sequence: Synthetic oligonucleotide
  source 1..30: mol_type = other DNA
atgcattctggtggaggatcaggcgttgaa

SEQ ID NO: 664 - protein, 10 aa, synthetic construct
  REGION 1..10: note = Description of Artificial Sequence: Synthetic peptide
MHSGGGSGVE

SEQ ID NO: 665 - DNA, 513 bp, synthetic construct
  misc_feature 1..513: note = Description of Artificial Sequence: Synthetic polynucleotide
  source 1..513: mol_type = other DNA
gcagctggaggccctggcgcaggctctgcagcccctgtatctagcacctcttctcttcctctggctgcgctgaacatgagagtgcggagacggttgtctttgttcttgaatgtcagaacacaggttgcagcggactggaccgctctggccgaggaaatggacttcgagtacctggagatcaggcaactcgaaacgcaggcagatcctacaggcagactgttggatgcgtggcagggacggcccggagccagcgttggacggctccttgatcttctcaccaagctgggcagagatgacgtgctgctggaattgggccccagtattgaggaggactgccaaaaatacatcttgaagcagcaacaggaggaggcggagaagcccctccaggtcgcagccgtcgattcatccgtgcctagaacagccgaacttgcaggcatcactaccctggatgatcccctgggccatatgccagagaggtttgatgcgtttatctgctattgcccaagcgatatc

SEQ ID NO: 666 - protein, 171 aa, synthetic construct; identical to SEQ ID NO: 214
  REGION 1..171: note = Description of Artificial Sequence: Synthetic polypeptide

SEQ ID NO: 667-668 - skipped (2 entries)

SEQ ID NO: 669 - DNA, 186 bp, synthetic construct
  misc_feature 1..186: note = Description of Artificial Sequence: Synthetic polynucleotide
  source 1..186: mol_type = other DNA
aagaaggtggccaagaagccaaccaataaagctccacatcctaaacaggagccacaagaaatcaactttccagatgatctccctggctctaatactgcagcccccgtgcaggaaaccctgcacggctgtcaacctgtgacacaggaagacgggaaggaaagcaggatatccgtgcaggaacggcaa

SEQ ID NO: 670 - protein, 62 aa, synthetic construct; identical to SEQ ID NO: 216
  REGION 1..62: note = Description of Artificial Sequence: Synthetic polypeptide

SEQ ID NO: 671-672 - skipped (2 entries)

SEQ ID NO: 673 - DNA, 27 bp, synthetic construct
  misc_feature 1..27: note = Description of Artificial Sequence: Synthetic oligonucleotide
  source 1..27: mol_type = other DNA
tacccatacgacgtgccagattatgct

SEQ ID NO: 674 - protein, 9 aa, synthetic construct
  REGION 1..9: note = Description of Artificial Sequence: Synthetic peptide
YPYDVPDYA

SEQ ID NO: 675-676 - skipped (2 entries)

SEQ ID NO: 677 - DNA, 54 bp, synthetic construct; identical to SEQ ID NO: 138
  misc_feature 1..54: note = Description of Artificial Sequence: Synthetic oligonucleotide
  source 1..54: mol_type = other DNA

SEQ ID NO: 678 - protein, 18 aa, synthetic construct
  REGION 1..18: note = Description of Artificial Sequence: Synthetic peptide
EGRGSLLTCGDVEENPGP

SEQ ID NO: 679 - DNA, 1002 bp, synthetic construct; identical to SEQ ID NO: 309
  misc_feature 1..1002: note = Description of Artificial Sequence: Synthetic polynucleotide
  source 1..1002: mol_type = other DNA

SEQ ID NO: 680 - protein, 333 aa, synthetic construct; identical to SEQ ID NO: 15
  REGION 1..333: note = Description of Artificial Sequence: Synthetic polypeptide

SEQ ID NO: 681-682 - skipped (2 entries)

SEQ ID NO: 683 - DNA, 261 bp, synthetic construct; identical to SEQ ID NO: 661
  misc_feature 1..261: note = Description of Artificial Sequence: Synthetic polynucleotide
  source 1..261: mol_type = other DNA

SEQ ID NO: 684 - protein, 87 aa, synthetic construct; identical to SEQ ID NO: 431
  REGION 1..87: note = Description of Artificial Sequence: Synthetic polypeptide

SEQ ID NO: 685-686 - skipped (2 entries)

SEQ ID NO: 687 - DNA, 261 bp, synthetic construct; identical to SEQ ID NO: 430
  misc_feature 1..261: note = Description of Artificial Sequence: Synthetic polynucleotide
  source 1..261: mol_type = other DNA

SEQ ID NO: 688 - protein, 87 aa, synthetic construct; identical to SEQ ID NO: 431
  REGION 1..87: note = Description of Artificial Sequence: Synthetic polypeptide

SEQ ID NO: 689 - DNA, 30 bp, synthetic construct; identical to SEQ ID NO: 663
  misc_feature 1..30: note = Description of Artificial Sequence: Synthetic oligonucleotide
  source 1..30: mol_type = other DNA

SEQ ID NO: 690 - protein, 10 aa, synthetic construct
  REGION 1..10: note = Description of Artificial Sequence: Synthetic peptide
MHSGGGSGVE

SEQ ID NO: 691 - DNA, 513 bp, synthetic construct; identical to SEQ ID NO: 665
  misc_feature 1..513: note = Description of Artificial Sequence: Synthetic polynucleotide
  source 1..513: mol_type = other DNA

SEQ ID NO: 692 - protein, 171 aa, synthetic construct; identical to SEQ ID NO: 214
  REGION 1..171: note = Description of Artificial Sequence: Synthetic polypeptide

SEQ ID NO: 693-694 - skipped (2 entries)

SEQ ID NO: 695 - DNA, 186 bp, synthetic construct; identical to SEQ ID NO: 669
  misc_feature 1..186: note = Description of Artificial Sequence: Synthetic polynucleotide
  source 1..186: mol_type = other DNA

SEQ ID NO: 696 - protein, 62 aa, synthetic construct; identical to SEQ ID NO: 216
  REGION 1..62: note = Description of Artificial Sequence: Synthetic polypeptide

SEQ ID NO: 697-698 - skipped (2 entries)

SEQ ID NO: 699 - DNA, 27 bp, synthetic construct
  misc_feature 1..27: note = Description of Artificial Sequence: Synthetic oligonucleotide
  source 1..27: mol_type = other DNA
tacccatacgacgtgccagattatgct

SEQ ID NO: 700 - protein, 9 aa, synthetic construct
  REGION 1..9: note = Description of Artificial Sequence: Synthetic peptide
YPYDVPDYA

SEQ ID NO: 701-702 - skipped (2 entries)

SEQ ID NO: 703 - DNA, 54 bp, synthetic construct; identical to SEQ ID NO: 138
  misc_feature 1..54: note = Description of Artificial Sequence: Synthetic oligonucleotide
  source 1..54: mol_type = other DNA

SEQ ID NO: 704 - protein, 18 aa, synthetic construct
  REGION 1..18: note = Description of Artificial Sequence: Synthetic peptide
EGRGSLLTCGDVEENPGP

SEQ ID NO: 705 - DNA, 1002 bp, synthetic construct; identical to SEQ ID NO: 309
  misc_feature 1..1002: note = Description of Artificial Sequence: Synthetic polynucleotide
  source 1..1002: mol_type = other DNA

SEQ ID NO: 706 - protein, 333 aa, synthetic construct; identical to SEQ ID NO: 15
  REGION 1..333: note = Description of Artificial Sequence: Synthetic polypeptide

SEQ ID NO: 707 - DNA, 63 bp, synthetic construct; identical to SEQ ID NO: 142
  misc_feature 1..63: note = Description of Artificial Sequence: Synthetic oligonucleotide
  source 1..63: mol_type = other DNA

SEQ ID NO: 708 - protein, 21 aa, synthetic construct
  REGION 1..21: note = Description of Artificial Sequence: Synthetic peptide
MEFGLSWLFLVAILKGVQCSR

SEQ ID NO: 709 - DNA, 327 bp, synthetic construct; identical to SEQ ID NO: 164
  misc_feature 1..327: note = Description of Artificial Sequence: Synthetic polynucleotide
  source 1..327: mol_type = other DNA

SEQ ID NO: 710 - protein, 109 aa, synthetic construct; identical to SEQ ID NO: 165
  REGION 1..109: note = Description of Artificial Sequence: Synthetic polypeptide

SEQ ID NO: 711 - DNA, 24 bp, synthetic construct
  misc_feature 1..24: note = Description of Artificial Sequence: Synthetic oligonucleotide
  source 1..24: mol_type = other DNA
ggcggaggaagcggaggtgggggc

SEQ ID NO: 712 - protein, 8 aa, synthetic construct
  REGION 1..8: note = Description of Artificial Sequence: Synthetic peptide
GGGSGGGG

SEQ ID NO: 713 - DNA, 357 bp, synthetic construct; identical to SEQ ID NO: 168
  misc_feature 1..357: note = Description of Artificial Sequence: Synthetic polynucleotide
  source 1..357: mol_type = other DNA

SEQ ID NO: 714 - protein, 119 aa, synthetic construct; identical to SEQ ID NO: 169
  REGION 1..119: note = Description of Artificial Sequence: Synthetic polypeptide

SEQ ID NO: 715-716 - skipped (2 entries)

SEQ ID NO: 717 - DNA, 48 bp, synthetic construct; identical to SEQ ID NO: 152
  misc_feature 1..48: note = Description of Artificial Sequence: Synthetic oligonucleotide
  source 1..48: mol_type = other DNA

SEQ ID NO: 718 - protein, 16 aa, synthetic construct
  REGION 1..16: note = Description of Artificial Sequence: Synthetic peptide
ELPTQGTFSNVSTNVS

SEQ ID NO: 719 - DNA, 126 bp, synthetic construct; identical to SEQ ID NO: 154
  misc_feature 1..126: note = Description of Artificial Sequence: Synthetic polynucleotide
  source 1..126: mol_type = other DNA

SEQ ID NO: 720 - protein, 42 aa, synthetic construct; identical to SEQ ID NO: 155
  REGION 1..42: note = Description of Artificial Sequence: Synthetic polypeptide

SEQ ID NO: 721 - DNA, 111 bp, synthetic construct; identical to SEQ ID NO: 156
  misc_feature 1..111: note = Description of Artificial Sequence: Synthetic polynucleotide
  source 1..111: mol_type = other DNA

SEQ ID NO: 722 - protein, 37 aa, synthetic construct; identical to SEQ ID NO: 157
  REGION 1..37: note = Description of Artificial Sequence: Synthetic polypeptide

SEQ ID NO: 723-724 - skipped (2 entries)

SEQ ID NO: 725 - DNA, 335 bp, synthetic construct
  misc_feature 1..335: note = Description of Artificial Sequence: Synthetic polynucleotide
  source 1..335: mol_type = other DNA
agagtgaagttcagcaggagcgcagacgcccccgcgtaccagcagggccagaaccagctctataacgagctcaatctaggacgaagagaggagtacgatgttttggacaagagacgtggccgggaccctgagatggggggaaagccgagaaggaagaaccctcaggaaggcctgtacaatgaactgcagaaagataagatggcggaggcctacagtgagattgggatgaaaggcgagcgccggaggggcaaggggcacgatggcctttaccagggtctcagtacagccaccaaggacacctacgacgcccttcacatgcaagctcttccacctcg

SEQ ID NO: 726 - protein, 111 aa, synthetic construct
  REGION 1..111: note = Description of Artificial Sequence: Synthetic polypeptide
RVKFSRSADAPAYQQGQNQLYNELNLGRREEYDVLDKRRGRDPEMGGKPRRKNPQEGLYNELQKDKMAEAYSEIGMKGERRRGKGHDGLYQGLSTATKDTYDALHMQALPP

SEQ ID NO: 727 - DNA, 24 bp, synthetic construct
  misc_feature 1..24: note = Description of Artificial Sequence: Synthetic oligonucleotide
  source 1..24: mol_type = other DNA
tcaggcggtggctcaggtgttaac

SEQ ID NO: 728 - protein, 8 aa, synthetic construct
  REGION 1..8: note = Description of Artificial Sequence: Synthetic peptide
SGGGSGVN

SEQ ID NO: 729 - DNA, 321 bp, synthetic construct; identical to SEQ ID NO: 573
  misc_feature 1..321: note = Description of Artificial Sequence: Synthetic polynucleotide
  source 1..321: mol_type = other DNA

SEQ ID NO: 730 - protein, 107 aa, synthetic construct; identical to SEQ ID NO: 532
  REGION 1..107: note = Description of Artificial Sequence: Synthetic polypeptide

SEQ ID NO: 731-732 - skipped (2 entries)

SEQ ID NO: 733 - DNA, 321 bp, synthetic construct; identical to SEQ ID NO: 577
  misc_feature 1..321: note = Description of Artificial Sequence: Synthetic polynucleotide
  source 1..321: mol_type = other DNA

SEQ ID NO: 734 - protein, 107 aa, synthetic construct; identical to SEQ ID NO: 532
  REGION 1..107: note = Description of Artificial Sequence: Synthetic polypeptide

SEQ ID NO: 735-736 - skipped (2 entries)

SEQ ID NO: 737 - DNA, 57 bp, synthetic construct
  misc_feature 1..57: note = Description of Artificial Sequence: Synthetic oligonucleotide
  source 1..57: mol_type = other DNA
gctactaacttcagcctgctgaagcaggctggagacgtggaggagaaccccgggcct

SEQ ID NO: 738 - protein, 19 aa, synthetic construct
  REGION 1..19: note = Description of Artificial Sequence: Synthetic peptide
ATNFSLLKQAGDVEENPGP

SEQ ID NO: 739 - DNA, 261 bp, synthetic construct; identical to SEQ ID NO: 547
  misc_feature 1..261: note = Description of Artificial Sequence: Synthetic polynucleotide
  source 1..261: mol_type = other DNA

SEQ ID NO: 740 - protein, 87 aa, synthetic construct; identical to SEQ ID NO: 431
  REGION 1..87: note = Description of Artificial Sequence: Synthetic polypeptide

SEQ ID NO: 741-742 - skipped (2 entries)

SEQ ID NO: 743 - DNA, 261 bp, synthetic construct; identical to SEQ ID NO: 531
  misc_feature 1..261: note = Description of Artificial Sequence: Synthetic polynucleotide
  source 1..261: mol_type = other DNA

SEQ ID NO: 744 - protein, 87 aa, synthetic construct; identical to SEQ ID NO: 431
  REGION 1..87: note = Description of Artificial Sequence: Synthetic polypeptide

SEQ ID NO: 745 - DNA, 18 bp, synthetic construct
  misc_feature 1..18: note = Description of Artificial Sequence: Synthetic oligonucleotide
  source 1..18: mol_type = other DNA
tcaggcggtggctcaggt

SEQ ID NO: 746 - protein, 6 aa, synthetic construct
  REGION 1..6: note = Description of Artificial Sequence: Synthetic peptide
SGGGSG

SEQ ID NO: 747 - DNA, 921 bp, synthetic construct; identical to SEQ ID NO: 523
  misc_feature 1..921: note = Description of Artificial Sequence: Synthetic polynucleotide
  source 1..921: mol_type = other DNA

SEQ ID NO: 748 - protein, 306 aa, synthetic construct
  REGION 1..306: note = Description of Artificial Sequence: Synthetic polypeptide
VDGFGDVGALESLRGNADLAYILSMEPCGHCLIINNVNFCRESGLRTRTGSNIDCEKLRRRFSSLHFMVEVKGDLTAKKMVLALLELARQDHGALDCCVVVILSHGCQASHLQFPGAVYGTDGCPVSVEKIVNIFNGTSCPSLGGKPKLFFIQACGGEQKDHGFEVASTSPEDESPGSNPEPDATPFQEGLRTFDQLDAISSLPTPSDIFVSYSTFPGFVSWRDPKSGSWYVETLDDIFEQWAHSEDLQSLLLRVANAVSVKGIYKQMPGCFNFLRKKLFFKTSASRAEGRGSLLTCGDVEENPGP

SEQ ID NO: 749 - DNA, 516 bp, synthetic construct; identical to SEQ ID NO: 251
  misc_feature 1..516: note = Description of Artificial Sequence: Synthetic polynucleotide
  source 1..516: mol_type = other DNA

SEQ ID NO: 750 - protein, 172 aa, synthetic construct; identical to SEQ ID NO: 240
  REGION 1..172: note = Description of Artificial Sequence: Synthetic polypeptide

SEQ ID NO: 751-752 - skipped (2 entries)

SEQ ID NO: 753 - DNA, 186 bp, synthetic construct; identical to SEQ ID NO: 255
  misc_feature 1..186: note = Description of Artificial Sequence: Synthetic polynucleotide
  source 1..186: mol_type = other DNA

SEQ ID NO: 754 - protein, 62 aa, synthetic construct; identical to SEQ ID NO: 216
  REGION 1..62: note = Description of Artificial Sequence: Synthetic polypeptide

SEQ ID NO: 755-756 - skipped (2 entries)

SEQ ID NO: 757 - DNA, 321 bp, synthetic construct
  misc_feature 1..321: note = Description of Artificial Sequence: Synthetic polynucleotide
  source 1..321: mol_type = other DNA
ggcgtccaagtcgaaaccattagtcccggcgatggcagaacatttcctaaaaggggacaaacatgtgtcgtccattatacaggcatgttggaggacggcaaaaaggtggacagtagtagagatcgcaataaacctttcaaattcatgttgggaaaacaagaagtcattaggggatgggaggagggcgtggctcaaatgtccgtcggccaacgcgctaagctcaccatcagccccgactacgcatacggcgctaccggacatcccggaattattccccctcacgctaccttggtgtttgacgtcgaactgttgaagctcgaa

SEQ ID NO: 758 - protein, 107 aa, synthetic construct; identical to SEQ ID NO: 3
  REGION 1..107: note = Description of Artificial Sequence: Synthetic polypeptide

SEQ ID NO: 759-760 - skipped (2 entries)

SEQ ID NO: 761 - DNA, 321 bp, synthetic construct
  misc_feature 1..321: note = Description of Artificial Sequence: Synthetic polynucleotide
  source 1..321: mol_type = other DNA
ggagtgcaggtggagactatctccccaggagacgggcgcaccttccccaagcgcggccagacctgcgtggtgcactacaccgggatgcttgaagatggaaagaaagttgattcctcccgggacagaaacaagccctttaagtttatgctaggcaagcaggaggtgatccgaggctgggaagaaggggttgcccagatgagtgtgggtcagagagccaaactgactatatctccagattatgcctatggtgccactgggcacccaggcatcatcccaccacatgccactctcgtcttcgatgtggagcttctaaaactggaa

SEQ ID NO: 762 - protein, 107 aa, synthetic construct; identical to SEQ ID NO: 3
  REGION 1..107: note = Description of Artificial Sequence: Synthetic polypeptide

SEQ ID NO: 763-764 - skipped (2 entries)

SEQ ID NO: 765 - DNA, 54 bp, synthetic construct; identical to SEQ ID NO: 138
  misc_feature 1..54: note = Description of Artificial Sequence: Synthetic oligonucleotide
  source 1..54: mol_type = other DNA

SEQ ID NO: 766 - protein, 18 aa, synthetic construct
  REGION 1..18: note = Description of Artificial Sequence: Synthetic peptide
EGRGSLLTCGDVEENPGP

SEQ ID NO: 767 - DNA, 1002 bp, synthetic construct; identical to SEQ ID NO: 309
  misc_feature 1..1002: note = Description of Artificial Sequence: Synthetic polynucleotide
  source 1..1002: mol_type = other DNA

SEQ ID NO: 768 - protein, 333 aa, synthetic construct; identical to SEQ ID NO: 15
  REGION 1..333: note = Description of Artificial Sequence: Synthetic polypeptide

SEQ ID NO: 769 - DNA, 42 bp, synthetic construct; identical to SEQ ID NO: 247
  misc_feature 1..42: note = Description of Artificial Sequence: Synthetic oligonucleotide
  source 1..42: mol_type = other DNA

SEQ ID NO: 770 - protein, 14 aa, synthetic construct
  REGION 1..14: note = Description of Artificial Sequence: Synthetic peptide
MGSSKSKPKDPSQR

SEQ ID NO: 771-772 - skipped (2 entries)

SEQ ID NO: 773 - DNA, 516 bp, synthetic construct; identical to SEQ ID NO: 251
  misc_feature 1..516: note = Description of Artificial Sequence: Synthetic polynucleotide
  source 1..516: mol_type = other DNA

SEQ ID NO: 774 - protein, 172 aa, synthetic construct; identical to SEQ ID NO: 240
  REGION 1..172: note = Description of Artificial Sequence: Synthetic polypeptide

SEQ ID NO: 775-776 - skipped (2 entries)

SEQ ID NO: 777 - DNA, 186 bp, synthetic construct; identical to SEQ ID NO: 255
  misc_feature 1..186: note = Description of Artificial Sequence: Synthetic polynucleotide
  source 1..186: mol_type = other DNA

SEQ ID NO: 778 - protein, 62 aa, synthetic construct; identical to SEQ ID NO: 216
  REGION 1..62: note = Description of Artificial Sequence: Synthetic polypeptide

SEQ ID NO: 779-780 - skipped (2 entries)

SEQ ID NO: 781 - DNA, 321 bp, synthetic construct; identical to SEQ ID NO: 757
  misc_feature 1..321: note = Description of Artificial Sequence: Synthetic polynucleotide
  source 1..321: mol_type = other DNA

SEQ ID NO: 782 - protein, 107 aa, synthetic construct; identical to SEQ ID NO: 3
  REGION 1..107: note = Description of Artificial Sequence: Synthetic polypeptide

SEQ ID NO: 783-784 - skipped (2 entries)

SEQ ID NO: 785 - DNA, 321 bp, synthetic construct; identical to SEQ ID NO: 761
  misc_feature 1..321: note = Description of Artificial Sequence: Synthetic polynucleotide
  source 1..321: mol_type = other DNA

SEQ ID NO: 786 - protein, 107 aa, synthetic construct; identical to SEQ ID NO: 3
  REGION 1..107: note = Description of Artificial Sequence: Synthetic polypeptide

SEQ ID NO: 787-788 - skipped (2 entries)

SEQ ID NO: 789 - DNA, 54 bp, synthetic construct; identical to SEQ ID NO: 138
  misc_feature 1..54: note = Description of Artificial Sequence: Synthetic oligonucleotide
  source 1..54: mol_type = other DNA

SEQ ID NO: 790 - protein, 18 aa, synthetic construct
  REGION 1..18: note = Description of Artificial Sequence: Synthetic peptide
EGRGSLLTCGDVEENPGP

SEQ ID NO: 791 - DNA, 1002 bp, synthetic construct; identical to SEQ ID NO: 309
  misc_feature 1..1002: note = Description of Artificial Sequence: Synthetic polynucleotide
  source 1..1002: mol_type = other DNA

SEQ ID NO: 792 - protein, 333 aa, synthetic construct; identical to SEQ ID NO: 15
  REGION 1..333: note = Description of Artificial Sequence: Synthetic polypeptide

SEQ ID NO: 793 - DNA, 261 bp, synthetic construct; identical to SEQ ID NO: 547
  misc_feature 1..261: note = Description of Artificial Sequence: Synthetic polynucleotide
  source 1..261: mol_type = other DNA

SEQ ID NO: 794 - protein, 87 aa, synthetic construct; identical to SEQ ID NO: 431
  REGION 1..87: note = Description of Artificial Sequence: Synthetic polypeptide

SEQ ID NO: 795-796 - skipped (2 entries)

SEQ ID NO: 797 - DNA, 261 bp, synthetic construct; identical to SEQ ID NO: 531
  misc_feature 1..261: note = Description of Artificial Sequence: Synthetic polynucleotide
  source 1..261: mol_type = other DNA

SEQ ID NO: 798 - protein, 87 aa, synthetic construct; identical to SEQ ID NO: 431
  REGION 1..87: note = Description of Artificial Sequence: Synthetic polypeptide

SEQ ID NO: 799 - DNA, 18 bp, synthetic construct
  misc_feature 1..18: note = Description of Artificial Sequence: Synthetic oligonucleotide
  source 1..18: mol_type = other DNA
tcaggcggtggctcaggt

SEQ ID NO: 800 - protein, 6 aa, synthetic construct
  REGION 1..6: note = Description of Artificial Sequence: Synthetic peptide
SGGGSG

SEQ ID NO: 801 - DNA, 863 bp, synthetic construct
  misc_feature 1..863: note = Description of Artificial Sequence: Synthetic polynucleotide
  source 1..863: mol_type = other DNA
tcgacggatttggtgatgtcggtgctcttgagagtttgaggggaaatgcagatttggcttacatcctgagcatggagccctgtggccactgcctcattatcaacaatgtgaacttctgccgtgagtccgggctccgcacccgcactggctccaacatcgactgtgagaagttgcggcgtcgcttctcctcgctgcatttcatggtggaggtgaagggcgacctgactgccaagaaaatggtgctggctttgctggagctggcgcggcaggaccacggtgctctggactgctgcgtggtggtcattctctctcacggctgtcaggccagccacctgcagttcccaggggctgtctacggcacagatggatgccctgtgtcggtcgagaagattgtgaacatcttcaatgggaccagctgccccagcctgggagggaagcccaagctctttttcatccaggcctgtggtggggagcagaaagaccatgggtttgaggtggcctccacttcccctgaagacgagtcccctggcagtaaccccgagccagatgccaccccgttccaggaaggtttgaggaccttcgaccagctggacgccatatctagtttgcccacacccagtgacatctttgtgtcctactctactttcccaggttttgtttcctggagggaccccaagagtggctcctggtacgttgagaccctggacgacatctttgagcagtgggctcactctgaagacctgcagtccctcctgcttagggtcgctaatgctgtttcggtgaaagggatttataaacagatgcctggttgctttaatttcctccggaaaaaacttttctttaaaacatcagctagcagagcc

SEQ ID NO: 802 - protein, 287 aa, synthetic construct; identical to SEQ ID NO: 536
  REGION 1..287: note = Description of Artificial Sequence: Synthetic polypeptide

SEQ ID NO: 803-804 - skipped (2 entries)

SEQ ID NO: 805 - DNA, 54 bp, synthetic construct; identical to SEQ ID NO: 138
  misc_feature 1..54: note = Description of Artificial Sequence: Synthetic oligonucleotide
  source 1..54: mol_type = other DNA

SEQ ID NO: 806 - protein, 18 aa, synthetic construct
  REGION 1..18: note = Description of Artificial Sequence: Synthetic peptide
EGRGSLLTCGDVEENPGP

SEQ ID NO: 807 - DNA, 63 bp, synthetic construct
  misc_feature 1..63: note = Description of Artificial Sequence: Synthetic oligonucleotide
  source 1..63: mol_type = other DNA
atggaatttggcctctcctggttgtttctcgtggccattcttaagggtgtgcagtgctccaga

SEQ ID NO: 808 - protein, 21 aa, synthetic construct
  REGION 1..21: note = Description of Artificial Sequence: Synthetic peptide
MEFGLSWLFLVAILKGVQCSR

SEQ ID NO: 809-810 - skipped (2 entries)

SEQ ID NO: 811 - DNA, 48 bp, synthetic construct; identical to SEQ ID NO: 152
  misc_feature 1..48: note = Description of Artificial Sequence: Synthetic oligonucleotide
  source 1..48: mol_type = other DNA

SEQ ID NO: 812 - protein, 16 aa, synthetic construct
  REGION 1..16: note = Description of Artificial Sequence: Synthetic peptide
ELPTQGTFSNVSTNVS

SEQ ID NO: 813 - DNA, 126 bp, synthetic construct; identical to SEQ ID NO: 154
  misc_feature 1..126: note = Description of Artificial Sequence: Synthetic polynucleotide
  source 1..126: mol_type = other DNA

SEQ ID NO: 814 - protein, 42 aa, synthetic construct; identical to SEQ ID NO: 155
  REGION 1..42: note = Description of Artificial Sequence: Synthetic polypeptide

SEQ ID NO: 815 - DNA, 117 bp, synthetic construct
  misc_feature 1..117: note = Description of Artificial Sequence: Synthetic polynucleotide
  source 1..117: mol_type = other DNA
atctatatctgggcacctctcgctggcacctgtggagtccttctgctcagcctggttattactctgtactgtaatcaccggaatcgccgccgcgtttgtaagtgtcccagggtcgac

SEQ ID NO: 816 - protein, 39 aa, synthetic construct
  REGION 1..39: note = Description of Artificial Sequence: Synthetic polypeptide
IYIWAPLAGTCGVLLLSLVITLYCNHRNRRRVCKCPRVD

SEQ ID NO: 817 - DNA, 335 bp, synthetic construct; identical to SEQ ID NO: 725
  misc_feature 1..335: note = Description of Artificial Sequence: Synthetic polynucleotide
  source 1..335: mol_type = other DNA

SEQ ID NO: 818 - protein, 111 aa, synthetic construct; identical to SEQ ID NO: 726
  REGION 1..111: note = Description of Artificial Sequence: Synthetic polypeptide

SEQ ID NO: 819 - DNA, 516 bp, synthetic construct; identical to SEQ ID NO: 251
  misc_feature 1..516: note = Description of Artificial Sequence: Synthetic polynucleotide
  source 1..516: mol_type = other DNA

SEQ ID NO: 820 - protein, 172 aa, synthetic construct; identical to SEQ ID NO: 240
  REGION 1..172: note = Description of Artificial Sequence: Synthetic polypeptide

SEQ ID NO: 821-822 - skipped (2 entries)

SEQ ID NO: 823 - DNA, 186 bp, synthetic construct; identical to SEQ ID NO: 255
  misc_feature 1..186: note = Description of Artificial Sequence: Synthetic polynucleotide
  source 1..186: mol_type = other DNA

SEQ ID NO: 824 - protein, 62 aa, synthetic construct; identical to SEQ ID NO: 216
  REGION 1..62: note = Description of Artificial Sequence: Synthetic polypeptide

SEQ ID NO: 825-826 - skipped (2 entries)

SEQ ID NO: 827 - DNA, 321 bp, synthetic construct; identical to SEQ ID NO: 757
  misc_feature 1..321: note = Description of Artificial Sequence: Synthetic polynucleotide
  source 1..321: mol_type = other DNA

SEQ ID NO: 828 - protein, 107 aa, synthetic construct; identical to SEQ ID NO: 3
  REGION 1..107: note = Description of Artificial Sequence: Synthetic polypeptide

SEQ ID NO: 829-830 - skipped (2 entries)

SEQ ID NO: 831 - DNA, 321 bp, synthetic construct; identical to SEQ ID NO: 761
  misc_feature 1..321: note = Description of Artificial Sequence: Synthetic polynucleotide
  source 1..321: mol_type = other DNA

SEQ ID NO: 832 - protein, 107 aa, synthetic construct; identical to SEQ ID NO: 3
  REGION 1..107: note = Description of Artificial Sequence: Synthetic polypeptide

SEQ ID NO: 833-834 - skipped (2 entries)

SEQ ID NO: 835 - DNA, 54 bp, synthetic construct; identical to SEQ ID NO: 138
  misc_feature 1..54: note = Description of Artificial Sequence: Synthetic oligonucleotide
  source 1..54: mol_type = other DNA

SEQ ID NO: 836 - protein, 18 aa, synthetic construct
  REGION 1..18: note = Description of Artificial Sequence: Synthetic peptide
EGRGSLLTCGDVEENPGP

SEQ ID NO: 837-838 - skipped (2 entries)

SEQ ID NO: 839 - DNA, 63 bp, synthetic construct; identical to SEQ ID NO: 142
  misc_feature 1..63: note = Description of Artificial Sequence: Synthetic oligonucleotide
  source 1..63: mol_type = other DNA

SEQ ID NO: 840 - protein, 21 aa, synthetic construct
  REGION 1..21: note = Description of Artificial Sequence: Synthetic peptide
MEFGLSWLFLVAILKGVQCSR

SEQ ID NO: 841 - DNA, 321 bp, synthetic construct; identical to SEQ ID NO: 144
  misc_feature 1..321: note = Description of Artificial Sequence: Synthetic polynucleotide
  source 1..321: mol_type = other DNA

SEQ ID NO: 842 - protein, 107 aa, synthetic construct; identical to SEQ ID NO: 145
  REGION 1..107: note = Description of Artificial Sequence: Synthetic polypeptide

SEQ ID NO: 843 - DNA, 24 bp, synthetic construct
  misc_feature 1..24: note = Description of Artificial Sequence: Synthetic oligonucleotide
  source 1..24: mol_type = other DNA
ggcggaggaagcggaggtgggggc

SEQ ID NO: 844 - protein, 8 aa, synthetic construct
  REGION 1..8: note = Description of Artificial Sequence: Synthetic peptide
GGGSGGGG

SEQ ID NO: 845 - DNA, 360 bp, synthetic construct; identical to SEQ ID NO: 148
  misc_feature 1..360: note = Description of Artificial Sequence: Synthetic polynucleotide
  source 1..360: mol_type = other DNA

SEQ ID NO: 846 - protein, 120 aa, synthetic construct; identical to SEQ ID NO: 149
  REGION 1..120: note = Description of Artificial Sequence: Synthetic polypeptide

SEQ ID NO: 847-848 - skipped (2 entries)

SEQ ID NO: 849 - DNA, 48 bp, synthetic construct; identical to SEQ ID NO: 152
  misc_feature 1..48: note = Description of Artificial Sequence: Synthetic oligonucleotide
  source 1..48: mol_type = other DNA

SEQ ID NO: 850 - protein, 16 aa, synthetic construct
  REGION 1..16: note = Description of Artificial Sequence: Synthetic peptide
ELPTQGTFSNVSTNVS

SEQ ID NO: 851 - DNA, 126 bp, synthetic construct; identical to SEQ ID NO: 154
  misc_feature 1..126: note = Description of Artificial Sequence: Synthetic polynucleotide
  source 1..126: mol_type = other DNA

SEQ ID NO: 852 - protein, 42 aa, synthetic construct; identical to SEQ ID NO: 155
  REGION 1..42: note = Description of Artificial Sequence: Synthetic polypeptide

SEQ ID NO: 853 - DNA, 111 bp, synthetic construct; identical to SEQ ID NO: 156
  misc_feature 1..111: note = Description of Artificial Sequence: Synthetic polynucleotide
  source 1..111: mol_type = other DNA

SEQ ID NO: 854 - protein, 37 aa, synthetic construct; identical to SEQ ID NO: 157
  REGION 1..37: note = Description of Artificial Sequence: Synthetic polypeptide

SEQ ID NO: 855-856 - skipped (2 entries)

SEQ ID NO: 857 - DNA, 335 bp, synthetic construct; identical to SEQ ID NO: 725
  misc_feature 1..335: note = Description of Artificial Sequence: Synthetic polynucleotide
  source 1..335: mol_type = other DNA

SEQ ID NO: 858 - protein, 111 aa, synthetic construct; identical to SEQ ID NO: 726
  REGION 1..111: note = Description of Artificial Sequence: Synthetic polypeptide

SEQ ID NO: 859 - DNA, 42 bp, synthetic construct; identical to SEQ ID NO: 247
  misc_feature 1..42: note = Description of Artificial Sequence: Synthetic oligonucleotide
  source 1..42: mol_type = other DNA

SEQ ID NO: 860 - protein, 14 aa, synthetic construct
  REGION 1..14: note = Description of Artificial Sequence: Synthetic peptide
MGSSKSKPKDPSQR

SEQ ID NO: 861-862 - skipped (2 entries)

SEQ ID NO: 863 - DNA, 516 bp, synthetic construct; identical to SEQ ID NO: 251
  misc_feature 1..516: note = Description of Artificial Sequence: Synthetic polynucleotide
  source 1..516: mol_type = other DNA

SEQ ID NO: 864 - protein, 172 aa, synthetic construct; identical to SEQ ID NO: 240
  REGION 1..172: note = Description of Artificial Sequence: Synthetic polypeptide

SEQ ID NO: 865-866 - skipped (2 entries)

SEQ ID NO: 867 - DNA, 186 bp, synthetic construct; identical to SEQ ID NO: 255
  misc_feature 1..186: note = Description of Artificial Sequence: Synthetic polynucleotide
  source 1..186: mol_type = other DNA

SEQ ID NO: 868 - protein, 62 aa, synthetic construct; identical to SEQ ID NO: 216
  REGION 1..62: note = Description of Artificial Sequence: Synthetic polypeptide

SEQ ID NO: 869-870 - skipped (2 entries)

SEQ ID NO: 871 - DNA, 321 bp, synthetic construct; identical to SEQ ID NO: 757
  misc_feature 1..321: note = Description of Artificial Sequence: Synthetic polynucleotide
  source 1..321: mol_type = other DNA

SEQ ID NO: 872 - protein, 107 aa, synthetic construct; identical to SEQ ID NO: 3
  REGION 1..107: note = Description of Artificial Sequence: Synthetic polypeptide

SEQ ID NO: 873-874 - skipped (2 entries)

SEQ ID NO: 875 - DNA, 321 bp, synthetic construct; identical to SEQ ID NO: 761
  misc_feature 1..321: note = Description of Artificial Sequence: Synthetic polynucleotide
  source 1..321: mol_type = other DNA

SEQ ID NO: 876 - protein, 107 aa, synthetic construct; identical to SEQ ID NO: 3
  REGION 1..107: note = Description of Artificial Sequence: Synthetic polypeptide

SEQ ID NO: 877-878 - skipped (2 entries)

SEQ ID NO: 879 - DNA, 54 bp, synthetic construct; identical to SEQ ID NO: 138
  misc_feature 1..54: note = Description of Artificial Sequence: Synthetic oligonucleotide
  source 1..54: mol_type = other DNA

SEQ ID NO: 880 - protein, 18 aa, synthetic construct
  REGION 1..18: note = Description of Artificial Sequence: Synthetic peptide
EGRGSLLTCGDVEENPGP

SEQ ID NO: 881-882 - skipped (2 entries)

SEQ ID NO: 883 - DNA, 63 bp, synthetic construct; identical to SEQ ID NO: 142
  misc_feature 1..63: note = Description of Artificial Sequence: Synthetic oligonucleotide
  source 1..63: mol_type = other DNA

SEQ ID NO: 884 - protein, 21 aa, synthetic construct
  REGION 1..21: note = Description of Artificial Sequence: Synthetic peptide
MEFGLSWLFLVAILKGVQCSR

SEQ ID NO: 885 - DNA, 321 bp, synthetic construct; identical to SEQ ID NO: 144
  misc_feature 1..321: note = Description of Artificial Sequence: Synthetic polynucleotide
  source 1..321: mol_type = other DNA

SEQ ID NO: 886 - protein, 107 aa, synthetic construct; identical to SEQ ID NO: 145
  REGION 1..107: note = Description of Artificial Sequence: Synthetic polypeptide

SEQ ID NO: 887 - DNA, 24 bp, synthetic construct
  misc_feature 1..24: note = Description of Artificial Sequence: Synthetic oligonucleotide
  source 1..24: mol_type = other DNA
ggcggaggaagcggaggtgggggc

SEQ ID NO: 888 - protein, 8 aa, synthetic construct
  REGION 1..8: note = Description of Artificial Sequence: Synthetic peptide
GGGSGGGG

SEQ ID NO: 889 - DNA, 360 bp, synthetic construct; identical to SEQ ID NO: 148
  misc_feature 1..360: note = Description of Artificial Sequence: Synthetic polynucleotide
  source 1..360: mol_type = other DNA

SEQ ID NO: 890 - protein, 120 aa, synthetic construct; identical to SEQ ID NO: 149
  REGION 1..120: note = Description of Artificial Sequence: Synthetic polypeptide

SEQ ID NO: 891-892 - skipped (2 entries)

SEQ ID NO: 893 - DNA, 48 bp, synthetic construct; identical to SEQ ID NO: 152
  misc_feature 1..48: note = Description of Artificial Sequence: Synthetic oligonucleotide
  source 1..48: mol_type = other DNA

SEQ ID NO: 894 - protein, 16 aa, synthetic construct
  REGION 1..16: note = Description of Artificial Sequence: Synthetic peptide
ELPTQGTFSNVSTNVS

SEQ ID NO: 895 - DNA, 126 bp, synthetic construct; identical to SEQ ID NO: 154
  misc_feature 1..126: note = Description of Artificial Sequence: Synthetic polynucleotide
  source 1..126: mol_type = other DNA

SEQ ID NO: 896 - protein, 42 aa, synthetic construct; identical to SEQ ID NO: 155
  REGION 1..42: note = Description of Artificial Sequence: Synthetic polypeptide

SEQ ID NO: 897 - DNA, 111 bp, synthetic construct; identical to SEQ ID NO: 156
  misc_feature 1..111: note = Description of Artificial Sequence: Synthetic polynucleotide
  source 1..111: mol_type = other DNA

SEQ ID NO: 898 - protein, 37 aa, synthetic construct; identical to SEQ ID NO: 157
  REGION 1..37: note = Description of Artificial Sequence: Synthetic polypeptide

SEQ ID NO: 899-900 - skipped (2 entries)

SEQ ID NO: 901 - DNA, 335 bp, synthetic construct; identical to SEQ ID NO: 725
  misc_feature 1..335: note = Description of Artificial Sequence: Synthetic polynucleotide
  source 1..335: mol_type = other DNA

SEQ ID NO: 902 - protein, 111 aa, synthetic construct; identical to SEQ ID NO: 726
  REGION 1..111: note = Description of Artificial Sequence: Synthetic polypeptide

SEQ ID NO: 903-904 - skipped (2 entries)

SEQ ID NO: 905 - DNA, 261 bp, synthetic construct; identical to SEQ ID NO: 531
  misc_feature 1..261: note = Description of Artificial Sequence: Synthetic polynucleotide
  source 1..261: mol_type = other DNA

SEQ ID NO: 906 - protein, 107 aa, synthetic construct; identical to SEQ ID NO: 532
  REGION 1..107: note = Description of Artificial Sequence: Synthetic polypeptide

SEQ ID NO: 907 - DNA, 24 bp, synthetic construct
  misc_feature 1..24: note = Description of Artificial Sequence: Synthetic oligonucleotide
  source 1..24: mol_type = other DNA
tcaggcggtggctcaggtgtcgag

SEQ ID NO: 908 - protein, 8 aa, synthetic construct
  REGION 1..8: note = Description of Artificial Sequence: Synthetic peptide
SGGGSGVD

SEQ ID NO: 909 - DNA, 864 bp, synthetic construct; identical to SEQ ID NO: 44
  misc_feature 1..864: note = Description of Artificial Sequence: Synthetic polynucleotide
  source 1..864: mol_type = other DNA

SEQ ID NO: 910 - protein, 287 aa, synthetic construct; identical to SEQ ID NO: 536
  REGION 1..287: note = Description of Artificial Sequence: Synthetic polypeptide

SEQ ID NO: 911 - DNA, 57 bp, synthetic construct; identical to SEQ ID NO: 527
  misc_feature 1..57: note = Description of Artificial Sequence: Synthetic oligonucleotide
  source 1..57: mol_type = other DNA

SEQ ID NO: 912 - protein, 18 aa, synthetic construct
  REGION 1..18: note = Description of Artificial Sequence: Synthetic peptide
EGRGSLLTCGDVEENPGP

SEQ ID NO: 913-914 - skipped (2 entries)

SEQ ID NO: 915 - DNA, 321 bp, synthetic construct; identical to SEQ ID NO: 761
  misc_feature 1..321: note = Description of Artificial Sequence: Synthetic polynucleotide
  source 1..321: mol_type = other DNA

SEQ ID NO: 916 - protein, 106 aa, synthetic construct; identical to SEQ ID NO: 520
  REGION 1..106: note = Description of Artificial Sequence: Synthetic polypeptide

SEQ ID NO: 917 - DNA, 24 bp, synthetic construct
  misc_feature 1..24: note = Description of Artificial Sequence: Synthetic oligonucleotide
  source 1..24: mol_type = other DNA
tcaggcggtggctcaggtgtcgag

SEQ ID NO: 918 - protein, 8 aa, synthetic construct
  REGION 1..8: note = Description of Artificial Sequence: Synthetic peptide
SGGGSGVD

SEQ ID NO: 919 - DNA, 864 bp, synthetic construct; identical to SEQ ID NO: 44
  misc_feature 1..864: note = Description of Artificial Sequence: Synthetic polynucleotide
  source 1..864: mol_type = other DNA

SEQ ID NO: 920 - protein, 287 aa, synthetic construct; identical to SEQ ID NO: 536
  REGION 1..287: note = Description of Artificial Sequence: Synthetic polypeptide

SEQ ID NO: 921 - DNA, 57 bp, synthetic construct; identical to SEQ ID NO: 527
  misc_feature 1..57: note = Description of Artificial Sequence: Synthetic oligonucleotide
  source 1..57: mol_type = other DNA

SEQ ID NO: 922 - protein, 18 aa, synthetic construct
  REGION 1..18: note = Description of Artificial Sequence: Synthetic peptide
EGRGSLLTCGDVEENPGP

SEQ ID NO: 923 - skipped

SEQ ID NO: 924 - protein, 5 aa, synthetic construct
  REGION 1..5: note = Description of Artificial Sequence: Synthetic peptide
SGGGS

SEQ ID NO: 925 - protein, 5 aa, synthetic construct
  REGION 1..5: note = Description of Artificial Sequence: Synthetic peptide
GSGPR

SEQ ID NO: 926 - DNA, 15 bp, synthetic construct
  misc_feature 1..15: note = Description of Artificial Sequence: Synthetic oligonucleotide
  source 1..15: mol_type = other DNA
atgctcgagcaattg

SEQ ID NO: 927 - protein, 5 aa, synthetic construct
  REGION 1..5: note = Description of Artificial Sequence: Synthetic peptide
MLEQL

SEQ ID NO: 928 - DNA, 321 bp, synthetic construct
  misc_feature 1..321: note = Description of Artificial Sequence: Synthetic polynucleotide
  source 1..321: mol_type = other DNA
ggcgtgcaagtggaaactataagcccgggagacggccgcacatttcccaagagaggccagacctgcgtggtgcactatacaggaatgctggaggacgggaagaaattcgatagctcccgggatcgaaataagcctttcaaattcatgctgggcaagcaagaagtcatcagaggctgggaagaaggcgtcgcccagatgtccgtgggtcagcgcgccaagctgacaattagtccagattacgcctatggcgcaacaggccatcccggcatcatccccccacatgccacactcgtctttgatgtcgagctcctgaaactggag

SEQ ID NO: 929 - protein, 107 aa, synthetic construct
  REGION 1..107: note = Description of Artificial Sequence: Synthetic polypeptide
GVQVETISPGDGRTFPKRGQTCVVHYTGMLEDGKKFDSSRDRNKPFKFMLGKQEVIRGWEEGVAQMSVGQRAKLTISPDYAYGATGHPGIIPPHATLVFDVELLKLE

SEQ ID NO: 930 - DNA, 12 bp, synthetic construct
  misc_feature 1..12: note = Description of Artificial Sequence: Synthetic oligonucleotide
  source 1..12: mol_type = other DNA
ggcgggcaattg

SEQ ID NO: 931 - protein, 4 aa, synthetic construct
  REGION 1..4: note = Description of Artificial Sequence: Synthetic peptide
GGQL

SEQ ID NO: 932 - DNA, 267 bp, synthetic construct
  misc_feature 1..267: note = Description of Artificial Sequence: Synthetic polynucleotide
  source 1..267: mol_type = other DNA
gaaatgtggcatgaagggttggaagaagcttcaaggctgtacttcggagagaggaacgtgaagggcatgtttgaggttcttgaacctctgcacgccatgatggaacggggaccgcagacactgaaagaaacctcttttaatcaggcctacggcagagacctgatggaggcccaagaatggtgtagaaagtatatgaaatccggtaacgtgaaagacctgactcaggcctgggacctttattaccatgtgttcaggcggatcagtaag

SEQ ID NO: 933 - protein, 89 aa, synthetic construct
  REGION 1..89: note = Description of Artificial Sequence: Synthetic polypeptide
EMWHEGLEEASRLYFGERNVKGMFEVLEPLHAMMERGPQTLKETSFNQAYGRDLMEAQEWCRKYMKSGNVKDLTQAWDLYYHVFRRISK

SEQ ID NO: 934 - DNA, 24 bp, synthetic construct
  misc_feature 1..24: note = Description of Artificial Sequence: Synthetic oligonucleotide
  source 1..24: mol_type = other DNA
tcaggcggtggctcaggtccatgg

SEQ ID NO: 935 - protein, 8 aa, synthetic construct
  REGION 1..8: note = Description of Artificial Sequence: Synthetic peptide
SGGGSGPW

SEQ ID NO: 936 - DNA, 858 bp, synthetic construct
  misc_feature 1..858: note = Description of Artificial Sequence: Synthetic polynucleotide
  source 1..858: mol_type = other DNA
ggatttggtgatgtcggtgctcttgagagtttgaggggaaatgcagatttggcttacatcctgagcatggagccctgtggccactgcctcattatcaacaatgtgaacttctgccgtgagtccgggctccgcacccgcactggctccaacatcgactgtgagaagttgcggcgtcgcttctcctcgctgcatttcatggtggaggtgaagggcgacctgactgccaagaaaatggtgctggctttgctggagctggcgcggcaggaccacggtgctctggactgctgcgtggtggtcattctctctcacggctgtcaggccagccacctgcagttcccaggggctgtctacggcacagatggatgccctgtgtcggtcgagaagattgtgaacatcttcaatgggaccagctgccccagcctgggagggaagcccaagctctttttcatccaggcctgtggtggggagcagaaagatcatgggtttgaggtggcctccacttcccctgaagacgagtcccctggcagtaaccccgagccagatgccaccccgttccaggaaggtttgaggaccttcgaccagctggacgccatatctagtttgcccacacccagtgacatctttgtgtcctactctactttcccaggttttgtttcctggagggaccccaagagtggctcctggtacgttgagaccctggacgacatctttgagcagtgggctcactctgaagacctgcagtccctcctgcttagggtcgctaatgctgtttcggtgaaagggatttataaacagatgcctggttgctttaatttcctccggaaaaaacttttctttaaaacatcagctagcagagcc

SEQ ID NO: 937 - protein, 286 aa, synthetic construct
  REGION 1..286: note = Description of Artificial Sequence: Synthetic polypeptide
GFGDVGALESLRGNADLAYILSMEPCGHCLIINNVNFCRESGLRTRTGSNIDCEKLRRRFSSLHFMVEVKGDLTAKKMVLALLELARQDHGALDCCVVVILSHGCQASHLQFPGAVYGTDGCPVSVEKIVNIFNGTSCPSLGGKPKLFFIQACGGEQKDHGFEVASTSPEDESPGSNPEPDATPFQEGLRTFDQLDAISSLPTPSDIFVSYSTFPGFVSWRDPKSGSWYVETLDDIFEQWAHSEDLQSLLLRVANAVSVKGIYKQMPGCFNFLRKKLFFKTSASRA

SEQ ID NO: 938 - DNA, 15 bp, synthetic construct
  misc_feature 1..15: note = Description of Artificial Sequence: Synthetic oligonucleotide
  source 1..15: mol_type = other DNA
ggatctggaccgcgg

SEQ ID NO: 939 - protein, 5 aa, synthetic construct
  REGION 1..5: note = Description of Artificial Sequence: Synthetic peptide
GSGPR

SEQ ID NO: 940 - DNA, 54 bp, synthetic construct; identical to SEQ ID NO: 138
  misc_feature 1..54: note = Description of Artificial Sequence: Synthetic oligonucleotide
  source 1..54: mol_type = other DNA

SEQ ID NO: 941 - protein, 18 aa, synthetic construct
  REGION 1..18: note = Description of Artificial Sequence: Synthetic peptide
EGRGSLLTCGDVEENPGP

SEQ ID NO: 942-943 - skipped (2 entries)

SEQ ID NO: 944 - DNA, 63 bp, synthetic construct; identical to SEQ ID NO: 142
  misc_feature 1..63: note = Description of Artificial Sequence: Synthetic oligonucleotide
  source 1..63: mol_type = other DNA

SEQ ID NO: 945 - protein, 21 aa, synthetic construct
  REGION 1..21: note = Description of Artificial Sequence: Synthetic peptide
MEFGLSWLFLVAILKGVQCSR

SEQ ID NO: 946 - DNA, 321 bp, synthetic construct; identical to SEQ ID NO: 144
  misc_feature 1..321: note = Description of Artificial Sequence: Synthetic polynucleotide
  source 1..321: mol_type = other DNA

SEQ ID NO: 947 - protein, 107 aa, synthetic construct; identical to SEQ ID NO: 145
  REGION 1..107: note = Description of Artificial Sequence: Synthetic polypeptide

SEQ ID NO: 948 - DNA, 24 bp, synthetic construct
  misc_feature 1..24: note = Description of Artificial Sequence: Synthetic oligonucleotide
  source 1..24: mol_type = other DNA
ggcggaggaagcggaggtgggggc

SEQ ID NO: 949 - protein, 8 aa, synthetic construct
  REGION 1..8: note = Description of Artificial Sequence: Synthetic peptide
GGGSGGGG

SEQ ID NO: 950 - DNA, 360 bp, synthetic construct; identical to SEQ ID NO: 148
  misc_feature 1..360: note = Description of Artificial Sequence: Synthetic polynucleotide
  source 1..360: mol_type = other DNA

SEQ ID NO: 951 - protein, 120 aa, synthetic construct; identical to SEQ ID NO: 149
  REGION 1..120: note = Description of Artificial Sequence: Synthetic polypeptide

SEQ ID NO: 952-953 - skipped (2 entries)

SEQ ID NO: 954 - DNA, 48 bp, synthetic construct; identical to SEQ ID NO: 152
  misc_feature 1..48: note = Description of Artificial Sequence: Synthetic oligonucleotide
  source 1..48: mol_type = other DNA

SEQ ID NO: 955 - protein, 16 aa, synthetic construct
  REGION 1..16: note = Description of Artificial Sequence: Synthetic peptide
ELPTQGTFSNVSTNVS

SEQ ID NO: 956 - DNA, 126 bp, synthetic construct; identical to SEQ ID NO: 154
  misc_feature 1..126: note = Description of Artificial Sequence: Synthetic polynucleotide
  source 1..126: mol_type = other DNA

SEQ ID NO: 957 - protein, 42 aa, synthetic construct; identical to SEQ ID NO: 155
  REGION 1..42: note = Description of Artificial Sequence: Synthetic polypeptide

SEQ ID NO: 958 - DNA, 111 bp, synthetic construct; identical to SEQ ID NO: 156
  misc_feature 1..111: note = Description of Artificial Sequence: Synthetic polynucleotide
  source 1..111: mol_type = other DNA

SEQ ID NO: 959 - protein, 37 aa, synthetic construct; identical to SEQ ID NO: 157
  REGION 1..37: note = Description of Artificial Sequence: Synthetic polypeptide

SEQ ID NO: 960-961 - skipped (2 entries)

SEQ ID NO: 962 - DNA, 336 bp, synthetic construct; identical to SEQ ID NO: 426
  misc_feature 1..336: note = Description of Artificial Sequence: Synthetic polynucleotide
  source 1..336: mol_type = other DNA

SEQ ID NO: 963 - protein, 112 aa, synthetic construct; identical to SEQ ID NO: 161
  REGION 1..112: note = Description of Artificial Sequence: Synthetic polypeptide

SEQ ID NO: 964 - DNA, 18 bp, synthetic construct
  misc_feature 1..18: note = Description of Artificial Sequence: Synthetic oligonucleotide
  source 1..18: mol_type = other DNA
ggaacgcgtggatcggga

SEQ ID NO: 965 - protein, 6 aa, synthetic construct
  REGION 1..6: note = Description of Artificial Sequence: Synthetic peptide
GTRGSG

SEQ ID NO: 966 - DNA, 57 bp, synthetic construct; identical to SEQ ID NO: 737
  misc_feature 1..57: note = Description of Artificial Sequence: Synthetic oligonucleotide
  source 1..57: mol_type = other DNA

SEQ ID NO: 967 - protein, 19 aa, synthetic construct
  REGION 1..19: note = Description of Artificial Sequence: Synthetic peptide
ATNFSLLKQAGDVEENPGP

SEQ ID NO: 968 - DNA, 516 bp, synthetic construct; identical to SEQ ID NO: 251
  misc_feature 1..516: note = Description of Artificial Sequence: Synthetic polynucleotide
  source 1..516: mol_type = other DNA

SEQ ID NO: 969 - protein, 172 aa, synthetic construct; identical to SEQ ID NO: 240
  REGION 1..172: note = Description of Artificial Sequence: Synthetic polypeptide

SEQ ID NO: 970-971 - skipped (2 entries)

SEQ ID NO: 972 - DNA, 186 bp, synthetic construct; identical to SEQ ID NO: 255
  misc_feature 1..186: note = Description of Artificial Sequence: Synthetic polynucleotide
  source 1..186: mol_type = other DNA

SEQ ID NO: 973 - protein, 62 aa, synthetic construct; identical to SEQ ID NO: 216
  REGION 1..62: note = Description of Artificial Sequence: Synthetic polypeptide

SEQ ID NO: 974-975 - skipped (2 entries)

SEQ ID NO: 976 - DNA, 321 bp, synthetic construct; identical to SEQ ID NO: 757
  misc_feature 1..321: note = Description of Artificial Sequence: Synthetic polynucleotide
  source 1..321: mol_type = other DNA

SEQ ID NO: 977 - protein, 107 aa, synthetic construct; identical to SEQ ID NO: 3
  REGION 1..107: note = Description of Artificial Sequence: Synthetic polypeptide

SEQ ID NO: 978-979 - skipped (2 entries)

SEQ ID NO: 980 - DNA, 321 bp, synthetic construct; identical to SEQ ID NO: 761
  misc_feature 1..321: note = Description of Artificial Sequence: Synthetic polynucleotide
  source 1..321: mol_type = other DNA

SEQ ID NO: 981 - protein, 107 aa, synthetic construct; identical to SEQ ID NO: 3
  REGION 1..107: note = Description of Artificial Sequence: Synthetic polypeptide

SEQ ID NO: 982 - skipped

SEQ ID NO: 983 - DNA, 15 bp, synthetic construct
  misc_feature 1..15: note = Description of Artificial Sequence: Synthetic oligonucleotide
  source 1..15: mol_type = other DNA
atgctcgagcaattg

SEQ ID NO: 984 - protein, 5 aa, synthetic construct
  REGION 1..5: note = Description of Artificial Sequence: Synthetic peptide
MLEQL

SEQ ID NO: 985 - DNA, 321 bp, synthetic construct; identical to SEQ ID NO: 928
  misc_feature 1..321: note = Description of Artificial Sequence: Synthetic polynucleotide
  source 1..321: mol_type = other DNA

SEQ ID NO: 986 - protein, 107 aa, synthetic construct; identical to SEQ ID NO: 929
  REGION 1..107: note = Description of Artificial Sequence: Synthetic polypeptide

SEQ ID NO: 987 - DNA, 12 bp, synthetic construct
  misc_feature 1..12: note = Description of Artificial Sequence: Synthetic oligonucleotide
  source 1..12: mol_type = other DNA
ggcgggcaattg

SEQ ID NO: 988 - protein, 4 aa, synthetic construct
  REGION 1..4: note = Description of Artificial Sequence: Synthetic peptide
GGQL

SEQ ID NO: 989 - DNA, 267 bp, synthetic construct; identical to SEQ ID NO: 932
  misc_feature 1..267: note = Description of Artificial Sequence: Synthetic polynucleotide
  source 1..267: mol_type = other DNA

SEQ ID NO: 990 - protein, 89 aa, synthetic construct; identical to SEQ ID NO: 933
  REGION 1..89: note = Description of Artificial Sequence: Synthetic polypeptide

SEQ ID NO: 991 - DNA, 24 bp, synthetic construct
  misc_feature 1..24: note = Description of Artificial Sequence: Synthetic oligonucleotide
  source 1..24: mol_type = other DNA
tcaggcggtggctcaggtccatgg

SEQ ID NO: 992 - protein, 8 aa, synthetic construct
  REGION 1..8: note = Description of Artificial Sequence: Synthetic peptide
SGGGSGPW

SEQ ID NO: 993 - DNA, 858 bp, synthetic construct; identical to SEQ ID NO: 936
  misc_feature 1..858: note = Description of Artificial Sequence: Synthetic polynucleotide
  source 1..858: mol_type = other DNA

SEQ ID NO: 994 - protein, 286 aa, synthetic construct; identical to SEQ ID NO: 937
  REGION 1..286: note = Description of Artificial Sequence: Synthetic polypeptide

SEQ ID NO: 995 - DNA, 15 bp, synthetic construct
  misc_feature 1..15: note = Description of Artificial Sequence: Synthetic oligonucleotide
  source 1..15: mol_type = other DNA
ggatctggaccgcgg

SEQ ID NO: 996 - protein, 5 aa, synthetic construct
  REGION 1..5: note = Description of Artificial Sequence: Synthetic peptide
GSGPR

SEQ ID NO: 997 - DNA, 54 bp, synthetic construct; identical to SEQ ID NO: 138
  misc_feature 1..54: note = Description of Artificial Sequence: Synthetic oligonucleotide
  source 1..54: mol_type = other DNA

SEQ ID NO: 998 - protein, 18 aa, synthetic construct
  REGION 1..18: note = Description of Artificial Sequence: Synthetic peptide
EGRGSLLTCGDVEENPGP

SEQ ID NO: 999-1000 - skipped (2 entries)

SEQ ID NO: 1001 - DNA, 63 bp, synthetic construct; identical to SEQ ID NO: 142
  misc_feature 1..63: note = Description of Artificial Sequence: Synthetic oligonucleotide
  source 1..63: mol_type = other DNA

SEQ ID NO: 1002 - protein, 21 aa, synthetic construct
  REGION 1..21: note = Description of Artificial Sequence: Synthetic peptide
MEFGLSWLFLVAILKGVQCSR

SEQ ID NO: 1003 - DNA, 318 bp, synthetic construct
  misc_feature 1..318: note = Description of Artificial Sequence: Synthetic polynucleotide
  source 1..318: mol_type = other DNA
gacatccaactgacgcaaagcccatctacactcagcgctagcatgggggacagggtcacaatcacgtgctctgcctcaagttccgttaggtttatccattggtatcagcagaaacctggaaaggccccaaaaagactgatctatgataccagcaagctggcttccggagtgccctcaaggttctcaggatctggcagtgggaccgatttcaccctgacaattagcagccttcagccagaggatttcgcaacctattactgtcagcaatgggggtccagcccattcactttcggccaaggaacaaaggtggagataaaa

SEQ ID NO: 1004 - protein, 106 aa, synthetic construct
  REGION 1..106: note = Description of Artificial Sequence: Synthetic polypeptide
DIQLTQSPSTLSASMGDRVTITCSASSSVRFIHWYQQKPGKAPKRLIYDTSKLASGVPSRFSGSGSGTDFTLTISSLQPEDFATYYCQQWGSSPFTFGQGTKVEIK

SEQ ID NO: 1005 - DNA, 24 bp, synthetic construct
  misc_feature 1..24: note = Description of Artificial Sequence: Synthetic oligonucleotide
  source 1..24: mol_type = other DNA
ggcggaggaagcggaggtgggggc

SEQ ID NO: 1006 - protein, 8 aa, synthetic construct
  REGION 1..8: note = Description of Artificial Sequence: Synthetic peptide
GGGSGGGG

SEQ ID NO: 1007 - DNA, 336 bp, synthetic construct
  misc_feature 1..336: note = Description of Artificial Sequence: Synthetic polynucleotide
  source 1..336: mol_type = other DNA
gaggtgcagctcgtggagtatggcgggggcctggtgcagcctgggggtagtctgaggctctcctgcgctgcctctggctttaacattaaagactactacatacattgggtgcggcaggccccaggcaaagggctcgaatgggtggcctggattgaccctgagaatggtgacactgagtttgtccccaagtttcagggcagagccaccatgagcgctgacacaagcaaaaacactgcttatctccaaatgaatagcctgcgagctgaagatacagcagtctattactgcaagacgggaggattctggggccagggaactctggtgacagttagttcc

SEQ ID NO: 1008 - protein, 112 aa, synthetic construct
  REGION 1..112: note = Description of Artificial Sequence: Synthetic polypeptide
EVQLVEYGGGLVQPGGSLRLSCAASGFNIKDYYIHWVRQAPGKGLEWVAWIDPENGDTEFVPKFQGRATMSADTSKNTAYLQMNSLRAEDTAVYYCKTGGFWGQGTLVTVSS

SEQ ID NO: 1009-1010 - skipped (2 entries)

SEQ ID NO: 1011 - DNA, 48 bp, synthetic construct; identical to SEQ ID NO: 152
  misc_feature 1..48: note = Description of Artificial Sequence: Synthetic oligonucleotide
  source 1..48: mol_type = other DNA

SEQ ID NO: 1012 - protein, 16 aa, synthetic construct
  REGION 1..16: note = Description of Artificial Sequence: Synthetic peptide
ELPTQGTFSNVSTNVS

SEQ ID NO: 1013 - DNA, 126 bp, synthetic construct; identical to SEQ ID NO: 154
  misc_feature 1..126: note = Description of Artificial Sequence: Synthetic polynucleotide
  source 1..126: mol_type = other DNA

SEQ ID NO: 1014 - protein, 42 aa, synthetic construct; identical to SEQ ID NO: 155
  REGION 1..42: note = Description of Artificial Sequence: Synthetic polypeptide

SEQ ID NO: 1015 - DNA, 111 bp, synthetic construct; identical to SEQ ID NO: 156
  misc_feature 1..111: note = Description of Artificial Sequence: Synthetic polynucleotide
  source 1..111: mol_type = other DNA

SEQ ID NO: 1016 - protein, 37 aa, synthetic construct; identical to SEQ ID NO: 157
  REGION 1..37: note = Description of Artificial Sequence: Synthetic polypeptide

SEQ ID NO: 1017-1018 - skipped (2 entries)

SEQ ID NO: 1019 - DNA, 336 bp, synthetic construct; identical to SEQ ID NO: 426
  misc_feature 1..336: note = Description of Artificial Sequence: Synthetic polynucleotide
  source 1..336: mol_type = other DNA

SEQ ID NO: 1020 - protein, 112 aa, synthetic construct; identical to SEQ ID NO: 161
  REGION 1..112: note = Description of Artificial Sequence: Synthetic polypeptide

SEQ ID NO: 1021 - DNA, 18 bp, synthetic construct
  misc_feature 1..18: note = Description of Artificial Sequence: Synthetic oligonucleotide
  source 1..18: mol_type = other DNA
ggaacgcgtggatcggga

SEQ ID NO: 1022 - protein, 6 aa, synthetic construct
  REGION 1..6: note = Description of Artificial Sequence: Synthetic peptide
GTRGSG

SEQ ID NO: 1023 - DNA, 57 bp, synthetic construct; identical to SEQ ID NO: 737
  misc_feature 1..57: note = Description of Artificial Sequence: Synthetic oligonucleotide
  source 1..57: mol_type = other DNA

SEQ ID NO: 1024 - protein, 19 aa, synthetic construct
  REGION 1..19: note = Description of Artificial Sequence: Synthetic peptide
ATNFSLLKQAGDVEENPGP

SEQ ID NO: 1025 - DNA, 516 bp, synthetic construct; identical to SEQ ID NO: 251
  misc_feature 1..516: note = Description of Artificial Sequence: Synthetic polynucleotide
  source 1..516: mol_type = other DNA

SEQ ID NO: 1026 - protein, 172 aa, synthetic construct; identical to SEQ ID NO: 240
  REGION 1..172: note = Description of Artificial Sequence: Synthetic polypeptide

SEQ ID NO: 1027-1028 - skipped (2 entries)

SEQ ID NO: 1029 - DNA, 186 bp, synthetic construct; identical to SEQ ID NO: 255
  misc_feature 1..186: note = Description of Artificial Sequence: Synthetic polynucleotide
  source 1..186: mol_type = other DNA

SEQ ID NO: 1030 - protein, 62 aa, synthetic construct; identical to SEQ ID NO: 216
  REGION 1..62: note = Description of Artificial Sequence: Synthetic polypeptide

SEQ ID NO: 1031-1032 - skipped (2 entries)

SEQ ID NO: 1033 - DNA, 321 bp, synthetic construct; identical to SEQ ID NO: 757
  misc_feature 1..321: note = Description of Artificial Sequence: Synthetic polynucleotide
  source 1..321: mol_type = other DNA

SEQ ID NO: 1034 - protein, 107 aa, synthetic construct; identical to SEQ ID NO: 3
  REGION 1..107: note = Description of Artificial Sequence: Synthetic polypeptide

SEQ ID NO: 1035-1036 - skipped (2 entries)

SEQ ID NO: 1037 - DNA, 321 bp, synthetic construct; identical to SEQ ID NO: 761
  misc_feature 1..321: note = Description of Artificial Sequence: Synthetic polynucleotide
  source 1..321: mol_type = other DNA

SEQ ID NO: 1038 - protein, 107 aa, synthetic construct; identical to SEQ ID NO: 3
  REGION 1..107: note = Description of Artificial Sequence: Synthetic polypeptide

SEQ ID NO: 1039-1041 - skipped (3 entries)

SEQ ID NO: 1042 - DNA, 267 bp, synthetic construct; identical to SEQ ID NO: 932
  misc_feature 1..267: note = Description of Artificial Sequence: Synthetic polynucleotide
  source 1..267: mol_type = other DNA

SEQ ID NO: 1043 - protein, 89 aa, synthetic construct; identical to SEQ ID NO: 933
  REGION 1..89: note = Description of Artificial Sequence: Synthetic polypeptide

SEQ ID NO: 1044 - DNA, 18 bp, synthetic construct
  misc_feature 1..18: note = Description of Artificial Sequence: Synthetic oligonucleotide
  source 1..18: mol_type = other DNA
tcaggcggtggctcaggt

SEQ ID NO: 1045 - protein, 6 aa, synthetic construct
  REGION 1..6: note = Description of Artificial Sequence: Synthetic peptide
SGGGSG

SEQ ID NO: 1046 - DNA, 318 bp, synthetic construct
  misc_feature 1..318: note = Description of Artificial Sequence: Synthetic polynucleotide
  source 1..318: mol_type = other DNA
ggcgtccaagtcgaaaccattagtcccggcgatggcagaacatttcctaaaaggggacaaacatgtgtcgtccattatacaggcatgttggaggacggcaaaaagttcgacagtagtagagatcgcaataaacctttcaaattcatgttgggaaaacaagaagtcattaggggatgggaggagggcgtggctcaaatgtccgtcggccaacgcgctaagctcaccatcagccccgactacgcatacggcgctaccggacatcccggaattattccccctcacgctaccttggtgtttgacgtcgaactgttgaagctc

SEQ ID NO: 1047 - protein, 106 aa, synthetic construct
  REGION 1..106: note = Description of Artificial Sequence: Synthetic polypeptide
GVQVETISPGDGRTFPKRGQTCVVHYTGMLEDGKKFDSSRDRNKPFKFMLGKQEVIRGWEEGVAQMSVGQRAKLTISPDYAYGATGHPGIIPPHATLVFDVELLKL

SEQ ID NO: 1048 - DNA, 24 bp, synthetic construct
  misc_feature 1..24: note = Description of Artificial Sequence: Synthetic oligonucleotide
  source 1..24: mol_type = other DNA
tcggggggcggatcaggagtcgac

SEQ ID NO: 1049 - protein, 7 aa, synthetic construct
  REGION 1..7: note = Description of Artificial Sequence: Synthetic peptide
SGGGSVD

SEQ ID NO: 1050 - DNA, 858 bp, synthetic construct
  misc_feature 1..858: note = Description of Artificial Sequence: Synthetic polynucleotide
  source 1..858: mol_type = other DNA
ggatttggtgatgtcggtgctcttgagagtttgaggggaaatgcagatttggcttacatcctgagcatggagccctgtggccactgcctcattatcaacaatgtgaacttctgccgtgagtccgggctccgcacccgcactggctccaacatcgactgtgagaagttgcggcgtcgcttctcctcgctgcatttcatggtggaggtgaagggcgacctgactgccaagaaaatggtgctggctttgctggagctggcgcggcaggaccacggtgctctggactgctgcgtggtggtcattctctctcacggctgtcaggccagccacctgcagttcccaggggctgtctacggcacagatggatgccctgtgtcggtcgagaagattgtgaacatcttcaatgggaccagctgccccagcctgggagggaagcccaagctctttttcatccaggcctgtggtggggagcagaaagaccatgggtttgaggtggcctccacttcccctgaagacgagtcccctggcagtaaccccgagccagatgccaccccgttccaggaaggtttgaggaccttcgaccagctggacgccatatctagtttgcccacacccagtgacatctttgtgtcctactctactttcccaggttttgtttcctggagggaccccaagagtggctcctggtacgttgagaccctggacgacatctttgagcagtgggctcactctgaagacctgcagtccctcctgcttagggtcgctaatgctgtttcggtgaaagggatttataaacagatgcctggttgctttaatttcctccggaaaaaacttttctttaaaacatcagctagcagagcc

SEQ ID NO: 1051 - protein, 286 aa, synthetic construct; identical to SEQ ID NO: 937
  REGION 1..286: note = Description of Artificial Sequence: Synthetic polypeptide

SEQ ID NO: 1052-1053 - skipped (2 entries)

SEQ ID NO: 1054 - DNA, 54 bp, synthetic construct; identical to SEQ ID NO: 138
  misc_feature 1..54: note = Description of Artificial Sequence: Synthetic oligonucleotide
  source 1..54: mol_type = other DNA

SEQ ID NO: 1055 - protein, 18 aa, synthetic construct
  REGION 1..18: note = Description of Artificial Sequence: Synthetic peptide
EGRGSLLTCGDVEENPGP

SEQ ID NO: 1056 - DNA, 999 bp, synthetic construct
  misc_feature 1..999: note = Description of Artificial Sequence: Synthetic polynucleotide
  source 1..999: mol_type = other DNA
atgccaccacctcgcctgctgttctttctgctgttcctgacacctatggaggtgcgacctgaggaaccactggtcgtgaaggtcgaggaaggcgacaatgccgtgctgcagtgcctgaaaggcacttctgatgggccaactcagcagctgacctggtccagggagtctcccctgaagccttttctgaaactgagcctgggactgccaggactgggaatccacatgcgccctctggctatctggctgttcatcttcaacgtgagccagcagatgggaggattctacctgtgccagccaggaccaccatccgagaaggcctggcagcctggatggaccgtcaacgtggaggggtctggagaactgtttaggtggaatgtgagtgacctgggaggactgggatgtgggctgaagaaccgctcctctgaaggcccaagttcaccctcagggaagctgatgagcccaaaactgtacgtgtgggccaaagatcggcccgagatctgggagggagaacctccatgcctgccacctagagacagcctgaatcagagtctgtcacaggatctgacaatggcccccgggtccactctgtggctgtcttgtggagtcccacccgacagcgtgtccagaggccctctgtcctggacccacgtgcatcctaaggggccaaaaagtctgctgtcactggaactgaaggacgatcggcctgccagagacatgtgggtcatggagactggactgctgctgccacgagcaaccgcacaggatgctggaaaatactattgccaccggggcaatctgacaatgtccttccatctggagatcactgcaaggcccgtgctgtggcactggctgctgcgaaccggaggatggaaggtcagtgctgtgacactggcatatctgatcttttgcctgtgctccctggtgggcattctgcatctgcagagagccctggtgctgcggagaaagagaaagagaatgactgacccaacaagaaggttt

SEQ ID NO: 1057 - protein, 333 aa, synthetic construct; identical to SEQ ID NO: 15
  REGION 1..333: note = Description of Artificial Sequence: Synthetic polypeptide

SEQ ID NO: 1058-1060 - skipped (3 entries)

SEQ ID NO: 1061 - DNA, 318 bp, synthetic construct; identical to SEQ ID NO: 1046
  misc_feature 1..318: note = Description of Artificial Sequence: Synthetic polynucleotide
  source 1..318: mol_type = other DNA

SEQ ID NO: 1062 - protein, 106 aa, synthetic construct; identical to SEQ ID NO: 1047
  REGION 1..106: note = Description of Artificial Sequence: Synthetic polypeptide

SEQ ID NO: 1063 - DNA, 17 bp, synthetic construct
  misc_feature 1..17: note = Description of Artificial Sequence: Synthetic oligonucleotide
  source 1..17: mol_type = other DNA
tcggggggcggatcagg

SEQ ID NO: 1064 - protein, 5 aa, synthetic construct
  REGION 1..5: note = Description of Artificial Sequence: Synthetic peptide
SGGGS

SEQ ID NO: 1065 - DNA, 267 bp, synthetic construct; identical to SEQ ID NO: 932
  misc_feature 1..267: note = Description of Artificial Sequence: Synthetic polynucleotide
  source 1..267: mol_type = other DNA

SEQ ID NO: 1066 - protein, 89 aa, synthetic construct; identical to SEQ ID NO: 933
  REGION 1..89: note = Description of Artificial Sequence: Synthetic polypeptide

SEQ ID NO: 1067 - DNA, 24 bp, synthetic construct
  misc_feature 1..24: note = Description of Artificial Sequence: Synthetic oligonucleotide
  source 1..24: mol_type = other DNA
tcaggcggtggctcaggtgtcgac

SEQ ID NO: 1068 - protein, 8 aa, synthetic construct
  REGION 1..8: note = Description of Artificial Sequence: Synthetic peptide
SGGGSGVD

SEQ ID NO: 1069 - DNA, 858 bp, synthetic construct; identical to SEQ ID NO: 1050
  misc_feature 1..858: note = Description of Artificial Sequence: Synthetic polynucleotide
  source 1..858: mol_type = other DNA

SEQ ID NO: 1070 - protein, 286 aa, synthetic construct; identical to SEQ ID NO: 937
  REGION 1..286: note = Description of Artificial Sequence: Synthetic polypeptide

SEQ ID NO: 1071-1072 - skipped (2 entries)

SEQ ID NO: 1073 - DNA, 54 bp, synthetic construct; identical to SEQ ID NO: 138
  misc_feature 1..54: note = Description of Artificial Sequence: Synthetic oligonucleotide
  source 1..54: mol_type = other DNA

SEQ ID NO: 1074 - protein, 18 aa, synthetic construct
  REGION 1..18: note = Description of Artificial Sequence: Synthetic peptide
EGRGSLLTCGDVEENPGP

SEQ ID NO: 1075 - DNA, 999 bp, synthetic construct; identical to SEQ ID NO: 1056
  misc_feature 1..999: note = Description of Artificial Sequence: Synthetic polynucleotide
  source 1..999: mol_type = other DNA

SEQ ID NO: 1076 - protein, 333 aa, synthetic construct; identical to SEQ ID NO: 15
  REGION 1..333: note = Description of Artificial Sequence: Synthetic polypeptide

SEQ ID NO: 1077 - skipped

SEQ ID NO: 1078 - DNA, 15 bp, synthetic construct
  misc_feature 1..15: note = Description of Artificial Sequence: Synthetic oligonucleotide
  source 1..15: mol_type = other DNA
atgctcgagcaattg

SEQ ID NO: 1079 - protein, 5 aa, synthetic construct
  REGION 1..5: note = Description of Artificial Sequence: Synthetic peptide
MLEQL

SEQ ID NO: 1080 - DNA, 321 bp, synthetic construct; identical to SEQ ID NO: 928
  misc_feature 1..321: note = Description of Artificial Sequence: Synthetic polynucleotide
  source 1..321: mol_type = other DNA

SEQ ID NO: 1081 - protein, 107 aa, synthetic construct; identical to SEQ ID NO: 929
  REGION 1..107: note = Description of Artificial Sequence: Synthetic polypeptide

SEQ ID NO: 1082 - DNA, 12 bp, synthetic construct
  misc_feature 1..12: note = Description of Artificial Sequence: Synthetic oligonucleotide
  source 1..12: mol_type = other DNA
ggcgggcaattg

SEQ ID NO: 1083 - protein, 4 aa, synthetic construct
  REGION 1..4: note = Description of Artificial Sequence: Synthetic peptide
GGQL

SEQ ID NO: 1084 - DNA, 267 bp, synthetic construct
  misc_feature 1..267: note = Description of Artificial Sequence: Synthetic polynucleotide
  source 1..267: mol_type = other DNA
gaaatgtggcatgaagggttggaagaagcttcaaggctgtacttcggagagaggaacgtgaagggcatgtttgaggttcttgaacctctgcacgccatgatggaacggggaccgcagacactgaaagaaacctcttttaatcaggcctacggcagagacctgatggaggcccaagaatggtgtagaaagtatatgaaatccggtaacgtgaaagacctgcttcaggcctgggacctttattaccatgtgttcaggcggatcagtaag

SEQ ID NO: 1085 - protein, 89 aa, synthetic construct
  REGION 1..89: note = Description of Artificial Sequence: Synthetic polypeptide
EMWHEGLEEASRLYFGERNVKGMFEVLEPLHAMMERGPQTLKETSFNQAYGRDLMEAQEWCRKYMKSGNVKDLLQAWDLYYHVFRRISK

SEQ ID NO: 1086 - DNA, 24 bp, synthetic construct
  misc_feature 1..24: note = Description of Artificial Sequence: Synthetic oligonucleotide
  source 1..24: mol_type = other DNA
tcaggcggtggctcaggtccatgg

SEQ ID NO: 1087 - protein, 8 aa, synthetic construct
  REGION 1..8: note = Description of Artificial Sequence: Synthetic peptide
SGGGSGPW

SEQ ID NO: 1088 - DNA, 858 bp, synthetic construct; identical to SEQ ID NO: 936
  misc_feature 1..858: note = Description of Artificial Sequence: Synthetic polynucleotide
  source 1..858: mol_type = other DNA

SEQ ID NO: 1089 - protein, 286 aa, synthetic construct; identical to SEQ ID NO: 937
  REGION 1..286: note = Description of Artificial Sequence: Synthetic polypeptide

SEQ ID NO: 1090 - DNA, 15 bp, synthetic construct
  misc_feature 1..15: note = Description of Artificial Sequence: Synthetic oligonucleotide
  source 1..15: mol_type = other DNA
ggatctggaccgcgg

SEQ ID NO: 1091 - protein, 5 aa, synthetic construct
  REGION 1..5: note = Description of Artificial Sequence: Synthetic peptide
GSGPR

SEQ ID NO: 1092 - DNA, 54 bp, synthetic construct; identical to SEQ ID NO: 138
  misc_feature 1..54: note = Description of Artificial Sequence: Synthetic oligonucleotide
  source 1..54: mol_type = other DNA

SEQ ID NO: 1093 - protein, 18 aa, synthetic construct
  REGION 1..18: note = Description of Artificial Sequence: Synthetic peptide
EGRGSLLTCGDVEENPGP

SEQ ID NO: 1094-1095 - skipped (2 entries)

SEQ ID NO: 1096 - DNA, 63 bp, synthetic construct; identical to SEQ ID NO: 142
  misc_feature 1..63: note = Description of Artificial Sequence: Synthetic oligonucleotide
  source 1..63: mol_type = other DNA

SEQ ID NO: 1097 - protein, 21 aa, synthetic construct
  REGION 1..21: note = Description of Artificial Sequence: Synthetic peptide
MEFGLSWLFLVAILKGVQCSR

SEQ ID NO: 1098 - DNA, 318 bp, synthetic construct; identical to SEQ ID NO: 1003
  misc_feature 1..318: note = Description of Artificial Sequence: Synthetic polynucleotide
  source 1..318: mol_type = other DNA

SEQ ID NO: 1099 - protein, 106 aa, synthetic construct; identical to SEQ ID NO: 1004
  REGION 1..106: note = Description of Artificial Sequence: Synthetic polypeptide

SEQ ID NO: 1100 - DNA, 24 bp, synthetic construct
  misc_feature 1..24: note = Description of Artificial Sequence: Synthetic oligonucleotide
  source 1..24: mol_type = other DNA
ggcggaggaagcggaggtgggggc

SEQ ID NO: 1101 - protein, 8 aa, synthetic construct
  REGION 1..8: note = Description of Artificial Sequence: Synthetic peptide
GGGSGGGG

SEQ ID NO: 1102 - DNA, 336 bp, synthetic construct; identical to SEQ ID NO: 1007
  misc_feature 1..336: note = Description of Artificial Sequence: Synthetic polynucleotide
  source 1..336: mol_type = other DNA

SEQ ID NO: 1103 - protein, 112 aa, synthetic construct; identical to SEQ ID NO: 1008
  REGION 1..112: note = Description of Artificial Sequence: Synthetic polypeptide

SEQ ID NO: 1104-1105 - skipped (2 entries)

SEQ ID NO: 1106 - DNA, 48 bp, synthetic construct; identical to SEQ ID NO: 152
  misc_feature 1..48: note = Description of Artificial Sequence: Synthetic oligonucleotide
  source 1..48: mol_type = other DNA

SEQ ID NO: 1107 - protein, 16 aa, synthetic construct
  REGION 1..16: note = Description of Artificial Sequence: Synthetic peptide
ELPTQGTFSNVSTNVS

SEQ ID NO: 1108 - DNA, 126 bp, synthetic construct; identical to SEQ ID NO: 154
  misc_feature 1..126: note = Description of Artificial Sequence: Synthetic polynucleotide
  source 1..126: mol_type = other DNA

SEQ ID NO: 1109 - protein, 42 aa, synthetic construct; identical to SEQ ID NO: 155
  REGION 1..42: note = Description of Artificial Sequence: Synthetic polypeptide

SEQ ID NO: 1110 - DNA, 111 bp, synthetic construct; identical to SEQ ID NO: 156
  misc_feature 1..111: note = Description of Artificial Sequence: Synthetic polynucleotide
  source 1..111: mol_type = other DNA

SEQ ID NO: 1111 - protein, 37 aa, synthetic construct; identical to SEQ ID NO: 157
  REGION 1..37: note = Description of Artificial Sequence: Synthetic polypeptide

SEQ ID NO: 1112-1113 - skipped (2 entries)

SEQ ID NO: 1114 - DNA, 336 bp, synthetic construct; identical to SEQ ID NO: 426
  misc_feature 1..336: note = Description of Artificial Sequence: Synthetic polynucleotide
  source 1..336: mol_type = other DNA

SEQ ID NO: 1115 - protein, 112 aa, synthetic construct; identical to SEQ ID NO: 161
  REGION 1..112: note = Description of Artificial Sequence: Synthetic polypeptide

SEQ ID NO: 1116 - DNA, 18 bp, synthetic construct
  misc_feature 1..18: note = Description of Artificial Sequence: Synthetic oligonucleotide
  source 1..18: mol_type = other DNA
ggaacgcgtggatcggga

SEQ ID NO: 1117 - protein, 6 aa, synthetic construct
  REGION 1..6: note = Description of Artificial Sequence: Synthetic peptide
GTRGSG

SEQ ID NO: 1118 - DNA, 57 bp, synthetic construct; identical to SEQ ID NO: 737
  misc_feature 1..57: note = Description of Artificial Sequence: Synthetic oligonucleotide
  source 1..57: mol_type = other DNA

SEQ ID NO: 1119 - protein, 19 aa, synthetic construct
  REGION 1..19: note = Description of Artificial Sequence: Synthetic peptide
ATNFSLLKQAGDVEENPGP

SEQ ID NO: 1120 - DNA, 516 bp, synthetic construct; identical to SEQ ID NO: 251
  misc_feature 1..516: note = Description of Artificial Sequence: Synthetic polynucleotide
  source 1..516: mol_type = other DNA

SEQ ID NO: 1121 - protein, 172 aa, synthetic construct; identical to SEQ ID NO: 240
  REGION 1..172: note = Description of Artificial Sequence: Synthetic polypeptide

SEQ ID NO: 1122-1123 - skipped (2 entries)

SEQ ID NO: 1124 - DNA, 186 bp, synthetic construct; identical to SEQ ID NO: 255
  misc_feature 1..186: note = Description of Artificial Sequence: Synthetic polynucleotide
  source 1..186: mol_type = other DNA

SEQ ID NO: 1125 - protein, 62 aa, synthetic construct; identical to SEQ ID NO: 216
  REGION 1..62: note = Description of Artificial Sequence: Synthetic polypeptide

SEQ ID NO: 1126-1127 - skipped (2 entries)

SEQ ID NO: 1128 - DNA, 321 bp, synthetic construct; identical to SEQ ID NO: 757
  misc_feature 1..321: note = Description of Artificial Sequence: Synthetic polynucleotide
  source 1..321: mol_type = other DNA

SEQ ID NO: 1129 - protein, 107 aa, synthetic construct; identical to SEQ ID NO: 3
  REGION 1..107: note = Description of Artificial Sequence: Synthetic polypeptide

SEQ ID NO: 1130-1131 - skipped (2 entries)

SEQ ID NO: 1132 - DNA, 321 bp, synthetic construct; identical to SEQ ID NO: 761
  misc_feature 1..321: note = Description of Artificial Sequence: Synthetic polynucleotide
  source 1..321: mol_type = other DNA

SEQ ID NO: 1133 - protein, 107 aa, synthetic construct; identical to SEQ ID NO: 3
  REGION 1..107: note = Description of Artificial Sequence: Synthetic polypeptide

SEQ ID NO: 1134 - skipped

SEQ ID NO: 1135 - DNA, 15 bp, synthetic construct
  misc_feature 1..15: note = Description of Artificial Sequence: Synthetic oligonucleotide
  source 1..15: mol_type = other DNA
atgctcgagcaattg

SEQ ID NO: 1136 - protein, 5 aa, synthetic construct
  REGION 1..5: note = Description of Artificial Sequence: Synthetic peptide
MLEQL

SEQ ID NO: 1137 - DNA, 321 bp, synthetic construct; identical to SEQ ID NO: 928
  misc_feature 1..321: note = Description of Artificial Sequence: Synthetic polynucleotide
  source 1..321: mol_type = other DNA

SEQ ID NO: 1138 - protein, 107 aa, synthetic construct; identical to SEQ ID NO: 929
  REGION 1..107: note = Description of Artificial Sequence: Synthetic polypeptide

SEQ ID NO: 1139 - DNA, 12 bp, synthetic construct
  misc_feature 1..12: note = Description of Artificial Sequence: Synthetic oligonucleotide
  source 1..12: mol_type = other DNA
ggcgggcaattg

SEQ ID NO: 1140 - protein, 4 aa, synthetic construct
  REGION 1..4: note = Description of Artificial Sequence: Synthetic peptide
GGQL

SEQ ID NO: 1141 - DNA, 267 bp, synthetic construct; identical to SEQ ID NO: 932
  misc_feature 1..267: note = Description of Artificial Sequence: Synthetic polynucleotide
  source 1..267: mol_type = other DNA

SEQ ID NO: 1142 - protein, 89 aa, synthetic construct; identical to SEQ ID NO: 933
  REGION 1..89: note = Description of Artificial Sequence: Synthetic polypeptide

SEQ ID NO: 1143 - DNA, 24 bp, synthetic construct
  misc_feature 1..24: note = Description of Artificial Sequence: Synthetic oligonucleotide
  source 1..24: mol_type = other DNA
tcaggcggtggctcaggtccatgg

SEQ ID NO: 1144 - protein, 8 aa, synthetic construct
  REGION 1..8: note = Description of Artificial Sequence: Synthetic peptide
SGGGSGPW

SEQ ID NO: 1145 - DNA, 858 bp, synthetic construct
  misc_feature 1..858: note = Description of Artificial Sequence: Synthetic polynucleotide
  source 1..858: mol_type = other DNA
ggatttggtgatgtcggtgctcttgagagtttgaggggaaatgcagatttggcttacatcctgagcatggagccctgtggccactgcctcattatcaacaatgtgaacttctgccgtgagtccgggctccgcacccgcactggctccaacatcgactgtgagaagttgcggcgtcgcttctcctcgctgcatttcatggtggaggtgaagggcgacctgactgccaagaaaatggtgctggctttgctggagctggcgcggcaggaccacggtgctctggactgctgcgtggtggtcattctctctcacggctgtcaggccagccacctgcagttcccaggggctgtctacggcacagatggatgccctgtgtcggtcgagaagattgtgaacatcttcaatgggaccagctgccccagcctgggagggaagcccaagctctttttcatccaggcctgtggtggggagcagaaagatcatgggtttgaggtggcctccacttcccctgaagacgagtcccctggcagtaaccccgagccagatgccaccccgttccaggaaggtttgaggaccttcgaccagctggacgccatatctagtttgcccacacccagtgacatctttgtgtcctactctactttcccaggttttgtttcctggagggaccccaagagtggctcctggtacgttgagaccctggacgacatctttgagcagtgggctcactctgaagacctgcagtccctcctgcttagggtcgctaatgctgtttcggtgaaagggatttataaacagatgcctggttgctttcaattcctccggaaaaaacttttctttaaaacatcagctagcagagcc

SEQ ID NO: 1146 - protein, 286 aa, synthetic construct
  REGION 1..286: note = Description of Artificial Sequence: Synthetic polypeptide
GFGDVGALESLRGNADLAYILSMEPCGHCLIINNVNFCRESGLRTRTGSNIDCEKLRRRFSSLHFMVEVKGDLTAKKMVLALLELARQDHGALDCCVVVILSHGCQASHLQFPGAVYGTDGCPVSVEKIVNIFNGTSCPSLGGKPKLFFIQACGGEQKDHGFEVASTSPEDESPGSNPEPDATPFQEGLRTFDQLDAISSLPTPSDIFVSYSTFPGFVSWRDPKSGSWYVETLDDIFEQWAHSEDLQSLLLRVANAVSVKGIYKQMPGCFQFLRKKLFFKTSASRA

SEQ ID NO: 1147 - DNA, 15 bp, synthetic construct
  misc_feature 1..15: note = Description of Artificial Sequence: Synthetic oligonucleotide
  source 1..15: mol_type = other DNA
ggatctggaccgcgg

SEQ ID NO: 1148 - protein, 5 aa, synthetic construct
  REGION 1..5: note = Description of Artificial Sequence: Synthetic peptide
GSGPR

SEQ ID NO: 1149 - DNA, 54 bp, synthetic construct; identical to SEQ ID NO: 138
  misc_feature 1..54: note = Description of Artificial Sequence: Synthetic oligonucleotide
  source 1..54: mol_type = other DNA

SEQ ID NO: 1150 - protein, 18 aa, synthetic construct
  REGION 1..18: note = Description of Artificial Sequence: Synthetic peptide
EGRGSLLTCGDVEENPGP

SEQ ID NO: 1151-1152 - skipped (2 entries)

SEQ ID NO: 1153 - DNA, 63 bp, synthetic construct; identical to SEQ ID NO: 142
  misc_feature 1..63: note = Description of Artificial Sequence: Synthetic oligonucleotide
  source 1..63: mol_type = other DNA

SEQ ID NO: 1154 - protein, 21 aa, synthetic construct
  REGION 1..21: note = Description of Artificial Sequence: Synthetic peptide
MEFGLSWLFLVAILKGVQCSR

SEQ ID NO: 1155 - DNA, 318 bp, synthetic construct; identical to SEQ ID NO: 1003
  misc_feature 1..318: note = Description of Artificial Sequence: Synthetic polynucleotide
  source 1..318: mol_type = other DNA

SEQ ID NO: 1156 - protein, 106 aa, synthetic construct; identical to SEQ ID NO: 1004
  REGION 1..106: note = Description of Artificial Sequence: Synthetic polypeptide

SEQ ID NO: 1157 - DNA, 24 bp, synthetic construct
  misc_feature 1..24: note = Description of Artificial Sequence: Synthetic oligonucleotide
  source 1..24: mol_type = other DNA
ggcggaggaagcggaggtgggggc

SEQ ID NO: 1158 - protein, 8 aa, synthetic construct
  REGION 1..8: note = Description of Artificial Sequence: Synthetic peptide
GGGSGGGG

SEQ ID NO: 1159 - DNA, 336 bp, synthetic construct; identical to SEQ ID NO: 1007
  misc_feature 1..336: note = Description of Artificial Sequence: Synthetic polynucleotide
  source 1..336: mol_type = other DNA

SEQ ID NO: 1160 - protein, 112 aa, synthetic construct; identical to SEQ ID NO: 1008
  REGION 1..112: note = Description of Artificial Sequence: Synthetic polypeptide

SEQ ID NO: 1161-1162 - skipped (2 entries)

SEQ ID NO: 1163 - DNA, 48 bp, synthetic construct; identical to SEQ ID NO: 152
  misc_feature 1..48: note = Description of Artificial Sequence: Synthetic oligonucleotide
  source 1..48: mol_type = other DNA

SEQ ID NO: 1164 - protein, 16 aa, synthetic construct
  REGION 1..16: note = Description of Artificial Sequence: Synthetic peptide
ELPTQGTFSNVSTNVS

SEQ ID NO: 1165 - DNA, 126 bp, synthetic construct; identical to SEQ ID NO: 154
  misc_feature 1..126: note = Description of Artificial Sequence: Synthetic polynucleotide
  source 1..126: mol_type = other DNA

SEQ ID NO: 1166 - protein, 42 aa, synthetic construct; identical to SEQ ID NO: 155
  REGION 1..42: note = Description of Artificial Sequence: Synthetic polypeptide

SEQ ID NO: 1167 - DNA, 111 bp, synthetic construct; identical to SEQ ID NO: 156
  misc_feature 1..111: note = Description of Artificial Sequence: Synthetic polynucleotide
  source 1..111: mol_type = other DNA

SEQ ID NO: 1168 - protein, 37 aa, synthetic construct; identical to SEQ ID NO: 157
  REGION 1..37: note = Description of Artificial Sequence: Synthetic polypeptide

SEQ ID NO: 1169-1170 - skipped (2 entries)

SEQ ID NO: 1171 - DNA, 336 bp, synthetic construct; identical to SEQ ID NO: 426
  misc_feature 1..336: note = Description of Artificial Sequence: Synthetic polynucleotide
  source 1..336: mol_type = other DNA

SEQ ID NO: 1172 - protein, 112 aa, synthetic construct; identical to SEQ ID NO: 161
  REGION 1..112: note = Description of Artificial Sequence: Synthetic polypeptide

SEQ ID NO: 1173 - DNA, 18 bp, synthetic construct
  misc_feature 1..18: note = Description of Artificial Sequence: Synthetic oligonucleotide
  source 1..18: mol_type = other DNA
ggaacgcgtggatcggga

SEQ ID NO: 1174 - protein, 6 aa, synthetic construct
  REGION 1..6: note = Description of Artificial Sequence: Synthetic peptide
GTRGSG

SEQ ID NO: 1175 - DNA, 57 bp, synthetic construct; identical to SEQ ID NO: 737
  misc_feature 1..57: note = Description of Artificial Sequence: Synthetic oligonucleotide
  source 1..57: mol_type = other DNA

SEQ ID NO: 1176 - protein, 19 aa, synthetic construct
  REGION 1..19: note = Description of Artificial Sequence: Synthetic peptide
ATNFSLLKQAGDVEENPGP

SEQ ID NO: 1177 - DNA, 516 bp, synthetic construct; identical to SEQ ID NO: 251
  misc_feature 1..516: note = Description of Artificial Sequence: Synthetic polynucleotide
  source 1..516: mol_type = other DNA

SEQ ID NO: 1178 - protein, 172 aa, synthetic construct; identical to SEQ ID NO: 240
  REGION 1..172: note = Description of Artificial Sequence: Synthetic polypeptide

SEQ ID NO: 1179-1180 - skipped (2 entries)

SEQ ID NO: 1181 - DNA, 186 bp, synthetic construct; identical to SEQ ID NO: 255
  misc_feature 1..186: note = Description of Artificial Sequence: Synthetic polynucleotide
  source 1..186: mol_type = other DNA

SEQ ID NO: 1182 - protein, 62 aa, synthetic construct; identical to SEQ ID NO: 216
  REGION 1..62: note = Description of Artificial Sequence: Synthetic polypeptide

SEQ ID NO: 1183-1184 - skipped (2 entries)

SEQ ID NO: 1185 - DNA, 321 bp, synthetic construct; identical to SEQ ID NO: 757
  misc_feature 1..321: note = Description of Artificial Sequence: Synthetic polynucleotide
  source 1..321: mol_type = other DNA

SEQ ID NO: 1186 - protein, 107 aa, synthetic construct; identical to SEQ ID NO: 3
  REGION 1..107: note = Description of Artificial Sequence: Synthetic polypeptide

SEQ ID NO: 1187-1188 - skipped (2 entries)

SEQ ID NO: 1189 - DNA, 321 bp, synthetic construct; identical to SEQ ID NO: 761
  misc_feature 1..321: note = Description of Artificial Sequence: Synthetic polynucleotide
  source 1..321: mol_type = other DNA

SEQ ID NO: 1190 - protein, 107 aa, synthetic construct; identical to SEQ ID NO: 3
  REGION 1..107: note = Description of Artificial Sequence: Synthetic polypeptide

SEQ ID NO: 1191 - skipped

SEQ ID NO: 1192 - DNA, 15 bp, synthetic construct
  misc_feature 1..15: note = Description of Artificial Sequence: Synthetic oligonucleotide
  source 1..15: mol_type = other DNA
atgctcgagcaattg

SEQ ID NO: 1193 - protein, 5 aa, synthetic construct
  REGION 1..5: note = Description of Artificial Sequence: Synthetic peptide
MLEQL

SEQ ID NO: 1194 - DNA, 321 bp, synthetic construct; identical to SEQ ID NO: 928
  misc_feature 1..321: note = Description of Artificial Sequence: Synthetic polynucleotide
  source 1..321: mol_type = other DNA

SEQ ID NO: 1195 - protein, 107 aa, synthetic construct; identical to SEQ ID NO: 929
  REGION 1..107: note = Description of Artificial Sequence: Synthetic polypeptide

SEQ ID NO: 1196 - DNA, 12 bp, synthetic construct
  misc_feature 1..12: note = Description of Artificial Sequence: Synthetic oligonucleotide
  source 1..12: mol_type = other DNA
ggcgggcaattg

SEQ ID NO: 1197 - protein, 4 aa, synthetic construct
  REGION 1..4: note = Description of Artificial Sequence: Synthetic peptide
GGQL

SEQ ID NO: 1198 - DNA, 267 bp, synthetic construct; identical to SEQ ID NO: 932
  misc_feature 1..267: note = Description of Artificial Sequence: Synthetic polynucleotide
  source 1..267: mol_type = other DNA

SEQ ID NO: 1199 - protein, 89 aa, synthetic construct; identical to SEQ ID NO: 933
  REGION 1..89: note = Description of Artificial Sequence: Synthetic polypeptide

SEQ ID NO: 1200 - DNA, 24 bp, synthetic construct
  misc_feature 1..24: note = Description of Artificial Sequence: Synthetic oligonucleotide
  source 1..24: mol_type = other DNA
tcaggcggtggctcaggtccatgg

SEQ ID NO: 1201 - protein, 8 aa, synthetic construct
  REGION 1..8: note = Description of Artificial Sequence: Synthetic peptide
SGGGSGPW

SEQ ID NO: 1202 - DNA, 858 bp, synthetic construct; identical to SEQ ID NO: 1145
  misc_feature 1..858: note = Description of Artificial Sequence: Synthetic polynucleotide
  source 1..858: mol_type = other DNA

SEQ ID NO: 1203 - protein, 286 aa, synthetic construct; identical to SEQ ID NO: 1146
  REGION 1..286: note = Description of Artificial Sequence: Synthetic polypeptide

SEQ ID NO: 1204 - DNA, 15 bp, synthetic construct
  misc_feature 1..15: note = Description of Artificial Sequence: Synthetic oligonucleotide
  source 1..15: mol_type = other DNA
ggatctggaccgcgg

SEQ ID NO: 1205 - protein, 5 aa, synthetic construct
  REGION 1..5: note = Description of Artificial Sequence: Synthetic peptide
GSGPR

SEQ ID NO: 1206 - DNA, 54 bp, synthetic construct; identical to SEQ ID NO: 138
  misc_feature 1..54: note = Description of Artificial Sequence: Synthetic oligonucleotide
  source 1..54: mol_type = other DNA

SEQ ID NO: 1207 - protein, 18 aa, synthetic construct
  REGION 1..18: note = Description of Artificial Sequence: Synthetic peptide
EGRGSLLTCGDVEENPGP

SEQ ID NO: 1208-1209 - skipped (2 entries)

SEQ ID NO: 1210 - DNA, 63 bp, synthetic construct; identical to SEQ ID NO: 142
  misc_feature 1..63: note = Description of Artificial Sequence: Synthetic oligonucleotide
  source 1..63: mol_type = other DNA

SEQ ID NO: 1211 - protein, 21 aa, synthetic construct
  REGION 1..21: note = Description of Artificial Sequence: Synthetic peptide
MEFGLSWLFLVAILKGVQCSR

SEQ ID NO: 1212 - DNA, 318 bp, synthetic construct; identical to SEQ ID NO: 1003
  misc_feature 1..318: note = Description of Artificial Sequence: Synthetic polynucleotide
  source 1..318: mol_type = other DNA

SEQ ID NO: 1213 - protein, 106 aa, synthetic construct; identical to SEQ ID NO: 1004
  REGION 1..106: note = Description of Artificial Sequence: Synthetic polypeptide

SEQ ID NO: 1214 - DNA, 24 bp, synthetic construct
  misc_feature 1..24: note = Description of Artificial Sequence: Synthetic oligonucleotide
  source 1..24: mol_type = other DNA
ggcggaggaagcggaggtgggggc

SEQ ID NO: 1215 - protein, 8 aa, synthetic construct
  REGION 1..8: note = Description of Artificial Sequence: Synthetic peptide
GGGSGGGG

SEQ ID NO: 1216 - DNA, 336 bp, synthetic construct; identical to SEQ ID NO: 1007
  misc_feature 1..336: note = Description of Artificial Sequence: Synthetic polynucleotide
  source 1..336: mol_type = other DNA

SEQ ID NO: 1217 - protein, 112 aa, synthetic construct; identical to SEQ ID NO: 1008
  REGION 1..112: note = Description of Artificial Sequence: Synthetic polypeptide

SEQ ID NO: 1218-1219 - skipped (2 entries)

SEQ ID NO: 1220 - DNA, 48 bp, synthetic construct; identical to SEQ ID NO: 152
  misc_feature 1..48: note = Description of Artificial Sequence: Synthetic oligonucleotide
  source 1..48: mol_type = other DNA

SEQ ID NO: 1221 - protein, 16 aa, synthetic construct
  REGION 1..16: note = Description of Artificial Sequence: Synthetic peptide
ELPTQGTFSNVSTNVS

SEQ ID NO: 1222 - DNA, 126 bp, synthetic construct; identical to SEQ ID NO: 154
  misc_feature 1..126: note = Description of Artificial Sequence: Synthetic polynucleotide
  source 1..126: mol_type = other DNA

SEQ ID NO: 1223 - protein, 42 aa, synthetic construct; identical to SEQ ID NO: 155
  REGION 1..42: note = Description of Artificial Sequence: Synthetic polypeptide

SEQ ID NO: 1224 - DNA, 111 bp, synthetic construct; identical to SEQ ID NO: 156
  misc_feature 1..111: note = Description of Artificial Sequence: Synthetic polynucleotide
  source 1..111: mol_type = other DNA

SEQ ID NO: 1225 - protein, 37 aa, synthetic construct; identical to SEQ ID NO: 157
  REGION 1..37: note = Description of Artificial Sequence: Synthetic polypeptide

SEQ ID NO: 1226-1227 - skipped (2 entries)

SEQ ID NO: 1228 - DNA, 336 bp, synthetic construct; identical to SEQ ID NO: 426
  misc_feature 1..336: note = Description of Artificial Sequence: Synthetic polynucleotide
  source 1..336: mol_type = other DNA

SEQ ID NO: 1229 - protein, 112 aa, synthetic construct; identical to SEQ ID NO: 161
  REGION 1..112: note = Description of Artificial Sequence: Synthetic polypeptide

SEQ ID NO: 1230 - DNA, 18 bp, synthetic construct
  misc_feature 1..18: note = Description of Artificial Sequence: Synthetic oligonucleotide
  source 1..18: mol_type = other DNA
ggaacgcgtggatcggga

SEQ ID NO: 1231 - protein, 6 aa, synthetic construct
  REGION 1..6: note = Description of Artificial Sequence: Synthetic peptide
GTRGSG

SEQ ID NO: 1232 - DNA, 57 bp, synthetic construct; identical to SEQ ID NO: 737
  misc_feature 1..57: note = Description of Artificial Sequence: Synthetic oligonucleotide
  source 1..57: mol_type = other DNA

SEQ ID NO: 1233 - protein, 19 aa, synthetic construct
  REGION 1..19: note = Description of Artificial Sequence: Synthetic peptide
ATNFSLLKQAGDVEENPGP

SEQ ID NO: 1234 - DNA, 516 bp, synthetic construct; identical to SEQ ID NO: 251
  misc_feature 1..516: note = Description of Artificial Sequence: Synthetic polynucleotide
  source 1..516: mol_type = other DNA

SEQ ID NO: 1235 - protein, 172 aa, synthetic construct; identical to SEQ ID NO: 240
  REGION 1..172: note = Description of Artificial Sequence: Synthetic polypeptide

SEQ ID NO: 1236-1237 - skipped (2 entries)

SEQ ID NO: 1238 - DNA, 186 bp, synthetic construct; identical to SEQ ID NO: 255
  misc_feature 1..186: note = Description of Artificial Sequence: Synthetic polynucleotide
  source 1..186: mol_type = other DNA

SEQ ID NO: 1239 - protein, 62 aa, synthetic construct; identical to SEQ ID NO: 216
  REGION 1..62: note = Description of Artificial Sequence: Synthetic polypeptide

SEQ ID NO: 1240-1241 - skipped (2 entries)

SEQ ID NO: 1242 - DNA, 321 bp, synthetic construct; identical to SEQ ID NO: 761
  misc_feature 1..321: note = Description of Artificial Sequence: Synthetic polynucleotide
  source 1..321: mol_type = other DNA

SEQ ID NO: 1243 - protein, 107 aa, synthetic construct; identical to SEQ ID NO: 3
  REGION 1..107: note = Description of Artificial Sequence: Synthetic polypeptide

SEQ ID NO: 1244 - skipped

SEQ ID NO: 1245 - DNA, 15 bp, synthetic construct
  misc_feature 1..15: note = Description of Artificial Sequence: Synthetic oligonucleotide
  source 1..15: mol_type = other DNA
atgctcgagcaattg

SEQ ID NO: 1246 - protein, 5 aa, synthetic construct
  REGION 1..5: note = Description of Artificial Sequence: Synthetic peptide
MLEQL

SEQ ID NO: 1247 - DNA, 321 bp, synthetic construct; identical to SEQ ID NO: 928
  misc_feature 1..321: note = Description of Artificial Sequence: Synthetic polynucleotide
  source 1..321: mol_type = other DNA

SEQ ID NO: 1248 - protein, 107 aa, synthetic construct; identical to SEQ ID NO: 929
  REGION 1..107: note = Description of Artificial Sequence: Synthetic polypeptide

SEQ ID NO: 1249 - DNA, 12 bp, synthetic construct
  misc_feature 1..12: note = Description of Artificial Sequence: Synthetic oligonucleotide
  source 1..12: mol_type = other DNA
ggcgggcaattg

SEQ ID NO: 1250 - protein, 4 aa, synthetic construct
  REGION 1..4: note = Description of Artificial Sequence: Synthetic peptide
GGQL

SEQ ID NO: 1251 - DNA, 267 bp, synthetic construct; identical to SEQ ID NO: 932
  misc_feature 1..267: note = Description of Artificial Sequence: Synthetic polynucleotide
  source 1..267: mol_type = other DNA

SEQ ID NO: 1252 - protein, 89 aa, synthetic construct; identical to SEQ ID NO: 933
  REGION 1..89: note = Description of Artificial Sequence: Synthetic polypeptide

SEQ ID NO: 1253 - DNA, 24 bp, synthetic construct
  misc_feature 1..24: note = Description of Artificial Sequence: Synthetic oligonucleotide
  source 1..24: mol_type = other DNA
tcaggcggtggctcaggtccatgg

SEQ ID NO: 1254 - protein, 8 aa, synthetic construct
  REGION 1..8: note = Description of Artificial Sequence: Synthetic peptide
SGGGSGPW

SEQ ID NO: 1255 - DNA, 858 bp, synthetic construct; identical to SEQ ID NO: 1145
  misc_feature 1..858: note = Description of Artificial Sequence: Synthetic polynucleotide
  source 1..858: mol_type = other DNA

SEQ ID NO: 1256 - protein, 286 aa, synthetic construct; identical to SEQ ID NO: 1146
  REGION 1..286: note = Description of Artificial Sequence: Synthetic polypeptide

SEQ ID NO: 1257 - DNA, 15 bp, synthetic construct
  misc_feature 1..15: note = Description of Artificial Sequence: Synthetic oligonucleotide
  source 1..15: mol_type = other DNA
ggatctggaccgcgg

SEQ ID NO: 1258 - protein, 5 aa, synthetic construct
  REGION 1..5: note = Description of Artificial Sequence: Synthetic peptide
GSGPR

SEQ ID NO: 1259 - DNA, 54 bp, synthetic construct; identical to SEQ ID NO: 138
  misc_feature 1..54: note = Description of Artificial Sequence: Synthetic oligonucleotide
  source 1..54: mol_type = other DNA

SEQ ID NO: 1260 - protein, 18 aa, synthetic construct
  REGION 1..18: note = Description of Artificial Sequence: Synthetic peptide
EGRGSLLTCGDVEENPGP

SEQ ID NO: 1261-1262 - skipped (2 entries)

SEQ ID NO: 1263 - DNA, 63 bp, synthetic construct; identical to SEQ ID NO: 142
  misc_feature 1..63: note = Description of Artificial Sequence: Synthetic oligonucleotide
  source 1..63: mol_type = other DNA

SEQ ID NO: 1264 - protein, 21 aa, synthetic construct
  REGION 1..21: note = Description of Artificial Sequence: Synthetic peptide
MEFGLSWLFLVAILKGVQCSR

SEQ ID NO: 1265 - DNA, 318 bp, synthetic construct; identical to SEQ ID NO: 1003
  misc_feature 1..318: note = Description of Artificial Sequence: Synthetic polynucleotide
  source 1..318: mol_type = other DNA

SEQ ID NO: 1266 - protein, 106 aa, synthetic construct; identical to SEQ ID NO: 1004
  REGION 1..106: note = Description of Artificial Sequence: Synthetic polypeptide

SEQ ID NO: 1267 - DNA, 24 bp, synthetic construct
  misc_feature 1..24: note = Description of Artificial Sequence: Synthetic oligonucleotide
  source 1..24: mol_type = other DNA
ggcggaggaagcggaggtgggggc

SEQ ID NO: 1268 - protein, 8 aa, synthetic construct
  REGION 1..8: note = Description of Artificial Sequence: Synthetic peptide
GGGSGGGG

SEQ ID NO: 1269 - DNA, 336 bp, synthetic construct; identical to SEQ ID NO: 1007
  misc_feature 1..336: note = Description of Artificial Sequence: Synthetic polynucleotide
  source 1..336: mol_type = other DNA

SEQ ID NO: 1270 - protein, 112 aa, synthetic construct; identical to SEQ ID NO: 1008
  REGION 1..112: note = Description of Artificial Sequence: Synthetic polypeptide

SEQ ID NO: 1271-1272 - skipped (2 entries)

SEQ ID NO: 1273 - DNA, 48 bp, synthetic construct; identical to SEQ ID NO: 152
  misc_feature 1..48: note = Description of Artificial Sequence: Synthetic oligonucleotide
  source 1..48: mol_type = other DNA

SEQ ID NO: 1274 - protein, 16 aa, synthetic construct
  REGION 1..16: note = Description of Artificial Sequence: Synthetic peptide
ELPTQGTFSNVSTNVS

SEQ ID NO: 1275 - DNA, 126 bp, synthetic construct; identical to SEQ ID NO: 154
  misc_feature 1..126: note = Description of Artificial Sequence: Synthetic polynucleotide
  source 1..126: mol_type = other DNA

SEQ ID NO: 1276 - protein, 42 aa, synthetic construct; identical to SEQ ID NO: 155
  REGION 1..42: note = Description of Artificial Sequence: Synthetic polypeptide

SEQ ID NO: 1277 - DNA, 111 bp, synthetic construct; identical to SEQ ID NO: 156
  misc_feature 1..111: note = Description of Artificial Sequence: Synthetic polynucleotide
  source 1..111: mol_type = other DNA

SEQ ID NO: 1278 - protein, 37 aa, synthetic construct; identical to SEQ ID NO: 157
  REGION 1..37: note = Description of Artificial Sequence: Synthetic polypeptide

SEQ ID NO: 1279-1280 - skipped (2 entries)

SEQ ID NO: 1281 - DNA, 336 bp, synthetic construct; identical to SEQ ID NO: 426
  misc_feature 1..336: note = Description of Artificial Sequence: Synthetic polynucleotide
  source 1..336: mol_type = other DNA

SEQ ID NO: 1282 - protein, 112 aa, synthetic construct; identical to SEQ ID NO: 161
  REGION 1..112: note = Description of Artificial Sequence: Synthetic polypeptide

SEQ ID NO: 1283 - DNA, 57 bp, synthetic construct
  misc_feature 1..57: note = Description of Artificial Sequence: Synthetic oligonucleotide
  source 1..57: mol_type = other DNA
gcaacgaatttttccctgctgaaacaggcaggggacgtagaggaaaatcctggtcct

SEQ ID NO: 1284 - protein, 19 aa, synthetic construct
  REGION 1..19: note = Description of Artificial Sequence: Synthetic peptide
ATNFSLLKQAGDVEENPGP

SEQ ID NO: 1285 - DNA, 516 bp, synthetic construct; identical to SEQ ID NO: 251
  misc_feature 1..516: note = Description of Artificial Sequence: Synthetic polynucleotide
  source 1..516: mol_type = other DNA

SEQ ID NO: 1286 - protein, 172 aa, synthetic construct; identical to SEQ ID NO: 240
  REGION 1..172: note = Description of Artificial Sequence: Synthetic polypeptide

SEQ ID NO: 1287-1288 - skipped (2 entries)

SEQ ID NO: 1289 - DNA, 186 bp, synthetic construct; identical to SEQ ID NO: 255
  misc_feature 1..186: note = Description of Artificial Sequence: Synthetic polynucleotide
  source 1..186: mol_type = other DNA

SEQ ID NO: 1290 - protein, 62 aa, synthetic construct; identical to SEQ ID NO: 216
  REGION 1..62: note = Description of Artificial Sequence: Synthetic polypeptide

SEQ ID NO: 1291 - skipped

SEQ ID NO: 1292 - DNA, 15 bp, synthetic construct
  misc_feature 1..15: note = Description of Artificial Sequence: Synthetic oligonucleotide
  source 1..15: mol_type = other DNA
atgctcgagcaattg

SEQ ID NO: 1293 - protein, 5 aa, synthetic construct
  REGION 1..5: note = Description of Artificial Sequence: Synthetic peptide
MLEQL

SEQ ID NO: 1294 - DNA, 321 bp, synthetic construct; identical to SEQ ID NO: 928
  misc_feature 1..321: note = Description of Artificial Sequence: Synthetic polynucleotide
  source 1..321: mol_type = other DNA

SEQ ID NO: 1295 - protein, 107 aa, synthetic construct; identical to SEQ ID NO: 929
  REGION 1..107: note = Description of Artificial Sequence: Synthetic polypeptide

SEQ ID NO: 1296 - DNA, 12 bp, synthetic construct
  misc_feature 1..12: note = Description of Artificial Sequence: Synthetic oligonucleotide
  source 1..12: mol_type = other DNA
ggcgggcaattg

SEQ ID NO: 1297 - protein, 4 aa, synthetic construct
  REGION 1..4: note = Description of Artificial Sequence: Synthetic peptide
GGQL

SEQ ID NO: 1298 - DNA, 267 bp, synthetic construct; identical to SEQ ID NO: 932
  misc_feature 1..267: note = Description of Artificial Sequence: Synthetic polynucleotide
  source 1..267: mol_type = other DNA

SEQ ID NO: 1299 - protein, 89 aa, synthetic construct; identical to SEQ ID NO: 933
  REGION 1..89: note = Description of Artificial Sequence: Synthetic polypeptide

SEQ ID NO: 1300 - DNA, 24 bp, synthetic construct
  misc_feature 1..24: note = Description of Artificial Sequence: Synthetic oligonucleotide
  source 1..24: mol_type = other DNA
tcaggcggtggctcaggtccatgg

SEQ ID NO: 1301 - protein, 8 aa, synthetic construct
  REGION 1..8: note = Description of Artificial Sequence: Synthetic peptide
SGGGSGPW

SEQ ID NO: 1302 - DNA, 858 bp, synthetic construct; identical to SEQ ID NO: 936
  misc_feature 1..858: note = Description of Artificial Sequence: Synthetic polynucleotide
  source 1..858: mol_type = other DNA

SEQ ID NO: 1303 - protein, 286 aa, synthetic construct; identical to SEQ ID NO: 937
  REGION 1..286: note = Description of Artificial Sequence: Synthetic polypeptide

SEQ ID NO: 1304 - DNA, 15 bp, synthetic construct
  misc_feature 1..15: note = Description of Artificial Sequence: Synthetic oligonucleotide
  source 1..15: mol_type = other DNA
ggatctggaccgcgg

SEQ ID NO: 1305 - protein, 5 aa, synthetic construct
  REGION 1..5: note = Description of Artificial Sequence: Synthetic peptide
GSGPR

SEQ ID NO: 1306 - DNA, 54 bp, synthetic construct; identical to SEQ ID NO: 138
  misc_feature 1..54: note = Description of Artificial Sequence: Synthetic oligonucleotide
  source 1..54: mol_type = other DNA

SEQ ID NO: 1307 - protein, 18 aa, synthetic construct
  REGION 1..18: note = Description of Artificial Sequence: Synthetic peptide
EGRGSLLTCGDVEENPGP

SEQ ID NO: 1308-1309 - skipped (2 entries)

SEQ ID NO: 1310 - DNA, 63 bp, synthetic construct; identical to SEQ ID NO: 142
  misc_feature 1..63: note = Description of Artificial Sequence: Synthetic oligonucleotide
  source 1..63: mol_type = other DNA

SEQ ID NO: 1311 - protein, 21 aa, synthetic construct
  REGION 1..21: note = Description of Artificial Sequence: Synthetic peptide
MEFGLSWLFLVAILKGVQCSR

SEQ ID NO: 1312 - DNA, 318 bp, synthetic construct; identical to SEQ ID NO: 1003
  misc_feature 1..318: note = Description of Artificial Sequence: Synthetic polynucleotide
  source 1..318: mol_type = other DNA

SEQ ID NO: 1313 - protein, 106 aa, synthetic construct; identical to SEQ ID NO: 1004
  REGION 1..106: note = Description of Artificial Sequence: Synthetic polypeptide

SEQ ID NO: 1314 - DNA, 24 bp, synthetic construct
  misc_feature 1..24: note = Description of Artificial Sequence: Synthetic oligonucleotide
  source 1..24: mol_type = other DNA
ggcggaggaagcggaggtgggggc

SEQ ID NO: 1315 - protein, 8 aa, synthetic construct
  REGION 1..8: note = Description of Artificial Sequence: Synthetic peptide
GGGSGGGG

SEQ ID NO: 1316 - DNA, 336 bp, synthetic construct; identical to SEQ ID NO: 1007
  misc_feature 1..336: note = Description of Artificial Sequence: Synthetic polynucleotide
  source 1..336: mol_type = other DNA

SEQ ID NO: 1317 - protein, 112 aa, synthetic construct; identical to SEQ ID NO: 1008
  REGION 1..112: note = Description of Artificial Sequence: Synthetic polypeptide

SEQ ID NO: 1318-1319 - skipped (2 entries)

SEQ ID NO: 1320 - DNA, 48 bp, synthetic construct; identical to SEQ ID NO: 152
  misc_feature 1..48: note = Description of Artificial Sequence: Synthetic oligonucleotide
  source 1..48: mol_type = other DNA

SEQ ID NO: 1321 - protein, 16 aa, synthetic construct
  REGION 1..16: note = Description of Artificial Sequence: Synthetic peptide
ELPTQGTFSNVSTNVS

SEQ ID NO: 1322 - DNA, 126 bp, synthetic construct; identical to SEQ ID NO: 154
  misc_feature 1..126: note = Description of Artificial Sequence: Synthetic polynucleotide
  source 1..126: mol_type = other DNA

SEQ ID NO: 1323 - protein, 42 aa, synthetic construct; identical to SEQ ID NO: 155
  REGION 1..42: note = Description of Artificial Sequence: Synthetic polypeptide

SEQ ID NO: 1324 - DNA, 111 bp, synthetic construct; identical to SEQ ID NO: 156
  misc_feature 1..111: note = Description of Artificial Sequence: Synthetic polynucleotide
  source 1..111: mol_type = other DNA

SEQ ID NO: 1325 - protein, 37 aa, synthetic construct; identical to SEQ ID NO: 157
  REGION 1..37: note = Description of Artificial Sequence: Synthetic polypeptide

SEQ ID NO: 1326-1327 - skipped (2 entries)

SEQ ID NO: 1328 - DNA, 336 bp, synthetic construct; identical to SEQ ID NO: 426
  misc_feature 1..336: note = Description of Artificial Sequence: Synthetic polynucleotide
  source 1..336: mol_type = other DNA

SEQ ID NO: 1329 - protein, 112 aa, synthetic construct; identical to SEQ ID NO: 161
  REGION 1..112: note = Description of Artificial Sequence: Synthetic polypeptide

SEQ ID NO: 1330 - DNA, 18 bp, synthetic construct
  misc_feature 1..18: note = Description of Artificial Sequence: Synthetic oligonucleotide
  source 1..18: mol_type = other DNA
ggaacgcgtggatcggga

SEQ ID NO: 1331 - protein, 6 aa, synthetic construct
  REGION 1..6: note = Description of Artificial Sequence: Synthetic peptide
GTRGSG

SEQ ID NO: 1332 - DNA, 57 bp, synthetic construct; identical to SEQ ID NO: 737
  misc_feature 1..57: note = Description of Artificial Sequence: Synthetic oligonucleotide
  source 1..57: mol_type = other DNA

SEQ ID NO: 1333 - protein, 19 aa, synthetic construct
  REGION 1..19: note = Description of Artificial Sequence: Synthetic peptide
ATNFSLLKQAGDVEENPGP

SEQ ID NO: 1334 - DNA, 516 bp, synthetic construct; identical to SEQ ID NO: 251
  misc_feature 1..516: note = Description of Artificial Sequence: Synthetic polynucleotide
  source 1..516: mol_type = other DNA

SEQ ID NO: 1335 - protein, 172 aa, synthetic construct; identical to SEQ ID NO: 240
  REGION 1..172: note = Description of Artificial Sequence: Synthetic polypeptide

SEQ ID NO: 1336-1337 - skipped (2 entries)

SEQ ID NO: 1338 - DNA, 186 bp, synthetic construct; identical to SEQ ID NO: 255
  misc_feature 1..186: note = Description of Artificial Sequence: Synthetic polynucleotide
  source 1..186: mol_type = other DNA

SEQ ID NO: 1339 - protein, 62 aa, synthetic construct; identical to SEQ ID NO: 216
  REGION 1..62: note = Description of Artificial Sequence: Synthetic polypeptide

SEQ ID NO: 1340-1341 - skipped (2 entries)

SEQ ID NO: 1342 - DNA, 321 bp, synthetic construct; identical to SEQ ID NO: 757
  misc_feature 1..321: note = Description of Artificial Sequence: Synthetic polynucleotide
  source 1..321: mol_type = other DNA

SEQ ID NO: 1343 - protein, 107 aa, synthetic construct; identical to SEQ ID NO: 3
  REGION 1..107: note = Description of Artificial Sequence: Synthetic polypeptide

SEQ ID NO: 1344-1345 - skipped (2 entries)

SEQ ID NO: 1346 - DNA, 321 bp, synthetic construct
  misc_feature 1..321: note = Description of Artificial Sequence: Synthetic polynucleotide
  source 1..321: mol_type = other DNA
ggagtgcaggtggagactatctccccaggagacgggcgcaccttccccaagcgcggccagacctgcgtggtgcactacaccgggatgcttgaagatggaaagaaatttgattcctcccgggacagaaacaagccctttaagtttatgctaggcaagcaggaggtgatccgaggctgggaagaaggggttgcccagatgagtgtgggtcagagagccaaactgactatatctccagattatgcctatggtgccactgggcacccaggcatcatcccaccacatgccactctcgtcttcgatgtggagcttctaaaactggaa

SEQ ID NO: 1347 - protein, 107 aa, synthetic construct; identical to SEQ ID NO: 929
  REGION 1..107: note = Description of Artificial Sequence: Synthetic polypeptide

SEQ ID NO: 1348 - skipped

SEQ ID NO: 1349 - DNA, 516 bp, synthetic construct; identical to SEQ ID NO: 251
  misc_feature 1..516: note = Description of Artificial Sequence: Synthetic polynucleotide
  source 1..516: mol_type = other DNA

SEQ ID NO: 1350 - protein, 172 aa, synthetic construct; identical to SEQ ID NO: 240
  REGION 1..172: note = Description of Artificial Sequence: Synthetic polypeptide

SEQ ID NO: 1351-1352 - skipped (2 entries)

SEQ ID NO: 1353 - DNA, 186 bp, synthetic construct; identical to SEQ ID NO: 255
  misc_feature 1..186: note = Description of Artificial Sequence: Synthetic polynucleotide
  source 1..186: mol_type = other DNA

SEQ ID NO: 1354 - protein, 62 aa, synthetic construct; identical to SEQ ID NO: 216
  REGION 1..62: note = Description of Artificial Sequence: Synthetic polypeptide

SEQ ID NO: 1355 - DNA, 15 bp, synthetic construct
  misc_feature 1..15: note = Description of Artificial Sequence: Synthetic oligonucleotide
  source 1..15: mol_type = other DNA
ggatctggaccgcgg

SEQ ID NO: 1356 - protein, 5 aa, synthetic construct
  REGION 1..5: note = Description of Artificial Sequence: Synthetic peptide
GSGPR

SEQ ID NO: 1357 - DNA, 54 bp, synthetic construct; identical to SEQ ID NO: 138
  misc_feature 1..54: note = Description of Artificial Sequence: Synthetic oligonucleotide
  source 1..54: mol_type = other DNA

SEQ ID NO: 1358 - protein, 18 aa, synthetic construct
  REGION 1..18: note = Description of Artificial Sequence: Synthetic peptide
EGRGSLLTCGDVEENPGP

SEQ ID NO: 1359-1360 - skipped (2 entries)

SEQ ID NO: 1361 - DNA, 63 bp, synthetic construct; identical to SEQ ID NO: 142
  misc_feature 1..63: note = Description of Artificial Sequence: Synthetic oligonucleotide
  source 1..63: mol_type = other DNA

SEQ ID NO: 1362 - protein, 21 aa, synthetic construct
  REGION 1..21: note = Description of Artificial Sequence: Synthetic peptide
MEFGLSWLFLVAILKGVQCSR

SEQ ID NO: 1363 - DNA, 321 bp, synthetic construct; identical to SEQ ID NO: 144
  misc_feature 1..321: note = Description of Artificial Sequence: Synthetic polynucleotide
  source 1..321: mol_type = other DNA

SEQ ID NO: 1364 - protein, 107 aa, synthetic construct; identical to SEQ ID NO: 145
  REGION 1..107: note = Description of Artificial Sequence: Synthetic polypeptide

SEQ ID NO: 1365 - DNA, 24 bp, synthetic construct
  misc_feature 1..24: note = Description of Artificial Sequence: Synthetic oligonucleotide
  source 1..24: mol_type = other DNA
ggcggaggaagcggaggtgggggc

SEQ ID NO: 1366 - protein, 8 aa, synthetic construct
  REGION 1..8: note = Description of Artificial Sequence: Synthetic peptide
GGGSGGGG

SEQ ID NO: 1367 - DNA, 360 bp, synthetic construct; identical to SEQ ID NO: 148
  misc_feature 1..360: note = Description of Artificial Sequence: Synthetic polynucleotide
  source 1..360: mol_type = other DNA

SEQ ID NO: 1368 - protein, 120 aa, synthetic construct; identical to SEQ ID NO: 149
  REGION 1..120: note = Description of Artificial Sequence: Synthetic polypeptide

SEQ ID NO: 1369-1370 - skipped (2 entries)

SEQ ID NO: 1371 - DNA, 48 bp, synthetic construct; identical to SEQ ID NO: 152
  misc_feature 1..48: note = Description of Artificial Sequence: Synthetic oligonucleotide
  source 1..48: mol_type = other DNA

SEQ ID NO: 1372 - protein, 16 aa, synthetic construct
  REGION 1..16: note = Description of Artificial Sequence: Synthetic peptide
ELPTQGTFSNVSTNVS

SEQ ID NO: 1373 - DNA, 126 bp, synthetic construct; identical to SEQ ID NO: 154
  misc_feature 1..126: note = Description of Artificial Sequence: Synthetic polynucleotide
  source 1..126: mol_type = other DNA

SEQ ID NO: 1374 - protein, 42 aa, synthetic construct; identical to SEQ ID NO: 155
  REGION 1..42: note = Description of Artificial Sequence: Synthetic polypeptide

SEQ ID NO: 1375 - DNA, 111 bp, synthetic construct; identical to SEQ ID NO: 156
  misc_feature 1..111: note = Description of Artificial Sequence: Synthetic polynucleotide
  source 1..111: mol_type = other DNA

SEQ ID NO: 1376 - protein, 37 aa, synthetic construct; identical to SEQ ID NO: 157
  REGION 1..37: note = Description of Artificial Sequence: Synthetic polypeptide

SEQ ID NO: 1377-1378 - skipped (2 entries)

SEQ ID NO: 1379 - DNA, 336 bp, synthetic construct; identical to SEQ ID NO: 426
  misc_feature 1..336: note = Description of Artificial Sequence: Synthetic polynucleotide
  source 1..336: mol_type = other DNA

SEQ ID NO: 1380 - protein, 112 aa, synthetic construct; identical to SEQ ID NO: 161
  REGION 1..112: note = Description of Artificial Sequence: Synthetic polypeptide

SEQ ID NO: 1381 - DNA, 42 bp, synthetic construct; identical to SEQ ID NO: 247
  misc_feature 1..42: note = Description of Artificial Sequence: Synthetic oligonucleotide
  source 1..42: mol_type = other DNA

SEQ ID NO: 1382 - protein, 14 aa, synthetic construct
  REGION 1..14: note = Description of Artificial Sequence: Synthetic peptide
MGSSKSKPKDPSQR

SEQ ID NO: 1383 - DNA, 516 bp, synthetic construct; identical to SEQ ID NO: 251
  misc_feature 1..516: note = Description of Artificial Sequence: Synthetic polynucleotide
  source 1..516: mol_type = other DNA

SEQ ID NO: 1384 - protein, 172 aa, synthetic construct; identical to SEQ ID NO: 240
  REGION 1..172: note = Description of Artificial Sequence: Synthetic polypeptide

SEQ ID NO: 1385-1386 - skipped (2 entries)

SEQ ID NO: 1387 - DNA, 186 bp, synthetic construct; identical to SEQ ID NO: 255
  misc_feature 1..186: note = Description of Artificial Sequence: Synthetic polynucleotide
  source 1..186: mol_type = other DNA

SEQ ID NO: 1388 - protein, 62 aa, synthetic construct; identical to SEQ ID NO: 216
  REGION 1..62: note = Description of Artificial Sequence: Synthetic polypeptide

SEQ ID NO: 1389 - DNA, 15 bp, synthetic construct
  misc_feature 1..15: note = Description of Artificial Sequence: Synthetic oligonucleotide
  source 1..15: mol_type = other DNA
ggatctggaccgcgg

SEQ ID NO: 1390 - protein, 5 aa, synthetic construct
  REGION 1..5: note = Description of Artificial Sequence: Synthetic peptide
GSGPR

SEQ ID NO: 1391 - DNA, 54 bp, synthetic construct; identical to SEQ ID NO: 138
  misc_feature 1..54: note = Description of Artificial Sequence: Synthetic oligonucleotide
  source 1..54: mol_type = other DNA

SEQ ID NO: 1392 - protein, 18 aa, synthetic construct
  REGION 1..18: note = Description of Artificial Sequence: Synthetic peptide
EGRGSLLTCGDVEENPGP

SEQ ID NO: 1393-1394 - skipped (2 entries)

SEQ ID NO: 1395 - DNA, 63 bp, synthetic construct; identical to SEQ ID NO: 142
  misc_feature 1..63: note = Description of Artificial Sequence: Synthetic oligonucleotide
  source 1..63: mol_type = other DNA

SEQ ID NO: 1396 - protein, 21 aa, synthetic construct
  REGION 1..21: note = Description of Artificial Sequence: Synthetic peptide
MEFGLSWLFLVAILKGVQCSR

SEQ ID NO: 1397 - DNA, 321 bp, synthetic construct; identical to SEQ ID NO: 144
  misc_feature 1..321: note = Description of Artificial Sequence: Synthetic polynucleotide
  source 1..321: mol_type = other DNA

SEQ ID NO: 1398 - protein, 107 aa, synthetic construct; identical to SEQ ID NO: 145
  REGION 1..107: note = Description of Artificial Sequence: Synthetic polypeptide

SEQ ID NO: 1399 - DNA, 24 bp, synthetic construct
  misc_feature 1..24: note = Description of Artificial Sequence: Synthetic oligonucleotide
  source 1..24: mol_type = other DNA
ggcggaggaagcggaggtgggggc

SEQ ID NO: 1400 - protein, 8 aa, synthetic construct
  REGION 1..8: note = Description of Artificial Sequence: Synthetic peptide
GGGSGGGG

SEQ ID NO: 1401 - DNA, 360 bp, synthetic construct; identical to SEQ ID NO: 148
  misc_feature 1..360: note = Description of Artificial Sequence: Synthetic polynucleotide
  source 1..360: mol_type = other DNA

SEQ ID NO: 1402 - protein, 120 aa, synthetic construct; identical to SEQ ID NO: 149
  REGION 1..120: note = Description of Artificial Sequence: Synthetic polypeptide

SEQ ID NO: 1403-1404 - skipped (2 entries)

SEQ ID NO: 1405 - DNA, 48 bp, synthetic construct; identical to SEQ ID NO: 152
  misc_feature 1..48: note = Description of Artificial Sequence: Synthetic oligonucleotide
  source 1..48: mol_type = other DNA

SEQ ID NO: 1406 - protein, 16 aa, synthetic construct
  REGION 1..16: note = Description of Artificial Sequence: Synthetic peptide
ELPTQGTFSNVSTNVS

SEQ ID NO: 1407 - DNA, 126 bp, synthetic construct; identical to SEQ ID NO: 154
  misc_feature 1..126: note = Description of Artificial Sequence: Synthetic polynucleotide
  source 1..126: mol_type = other DNA

SEQ ID NO: 1408 - protein, 42 aa, synthetic construct; identical to SEQ ID NO: 155
  REGION 1..42: note = Description of Artificial Sequence: Synthetic polypeptide

SEQ ID NO: 1409 - DNA, 111 bp, synthetic construct; identical to SEQ ID NO: 156
  misc_feature 1..111: note = Description of Artificial Sequence: Synthetic polynucleotide
  source 1..111: mol_type = other DNA

SEQ ID NO: 1410 - protein, 37 aa, synthetic construct; identical to SEQ ID NO: 157
  REGION 1..37: note = Description of Artificial Sequence: Synthetic polypeptide

SEQ ID NO: 1411-1412 - skipped (2 entries)

SEQ ID NO: 1413 - DNA, 336 bp, synthetic construct; identical to SEQ ID NO: 426
  misc_feature 1..336: note = Description of Artificial Sequence: Synthetic polynucleotide
  source 1..336: mol_type = other DNA

SEQ ID NO: 1414 - protein, 112 aa, synthetic construct; identical to SEQ ID NO: 161
  REGION 1..112: note = Description of Artificial Sequence: Synthetic polypeptide

SEQ ID NO: 1415 - DNA, 63 bp, synthetic construct; identical to SEQ ID NO: 142
  misc_feature 1..63: note = Description of Artificial Sequence: Synthetic oligonucleotide
  source 1..63: mol_type = other DNA

SEQ ID NO: 1416 - protein, 21 aa, synthetic construct
  REGION 1..21: note = Description of Artificial Sequence: Synthetic peptide
MEFGLSWLFLVAILKGVQCSR

SEQ ID NO: 1417 - DNA, 321 bp, synthetic construct; identical to SEQ ID NO: 144
  misc_feature 1..321: note = Description of Artificial Sequence: Synthetic polynucleotide
  source 1..321: mol_type = other DNA

SEQ ID NO: 1418 - protein, 107 aa, synthetic construct; identical to SEQ ID NO: 145
  REGION 1..107: note = Description of Artificial Sequence: Synthetic polypeptide

SEQ ID NO: 1419 - DNA, 24 bp, synthetic construct
  misc_feature 1..24: note = Description of Artificial Sequence: Synthetic oligonucleotide
  source 1..24: mol_type = other DNA
ggcggaggaagcggaggtgggggc

SEQ ID NO: 1420 - protein, 8 aa, synthetic construct
  REGION 1..8: note = Description of Artificial Sequence: Synthetic peptide
GGGSGGGG

SEQ ID NO: 1421 - DNA, 360 bp, synthetic construct; identical to SEQ ID NO: 148
  misc_feature 1..360: note = Description of Artificial Sequence: Synthetic polynucleotide
  source 1..360: mol_type = other DNA

SEQ ID NO: 1422 - protein, 120 aa, synthetic construct; identical to SEQ ID NO: 149
  REGION 1..120: note = Description of Artificial Sequence: Synthetic polypeptide

SEQ ID NO: 1423-1424 - skipped (2 entries)

SEQ ID NO: 1425 - DNA, 48 bp, synthetic construct; identical to SEQ ID NO: 152
  misc_feature 1..48: note = Description of Artificial Sequence: Synthetic oligonucleotide
  source 1..48: mol_type = other DNA

SEQ ID NO: 1426 - protein, 16 aa, synthetic construct
  REGION 1..16: note = Description of Artificial Sequence: Synthetic peptide
ELPTQGTFSNVSTNVS

SEQ ID NO: 1427 - DNA, 126 bp, synthetic construct; identical to SEQ ID NO: 154
  misc_feature 1..126: note = Description of Artificial Sequence: Synthetic polynucleotide
  source 1..126: mol_type = other DNA

SEQ ID NO: 1428 - protein, 42 aa, synthetic construct; identical to SEQ ID NO: 155
  REGION 1..42: note = Description of Artificial Sequence: Synthetic polypeptide

SEQ ID NO: 1429 - DNA, 111 bp, synthetic construct; identical to SEQ ID NO: 156
  misc_feature 1..111: note = Description of Artificial Sequence: Synthetic polynucleotide
  source 1..111: mol_type = other DNA

SEQ ID NO: 1430 - protein, 37 aa, synthetic construct; identical to SEQ ID NO: 157
  REGION 1..37: note = Description of Artificial Sequence: Synthetic polypeptide

SEQ ID NO: 1431-1432 - skipped (2 entries)

SEQ ID NO: 1433 - DNA, 336 bp, synthetic construct; identical to SEQ ID NO: 426
  misc_feature 1..336: note = Description of Artificial Sequence: Synthetic polynucleotide
  source 1..336: mol_type = other DNA

SEQ ID NO: 1434 - protein, 112 aa, synthetic construct; identical to SEQ ID NO: 161
  REGION 1..112: note = Description of Artificial Sequence: Synthetic polypeptide

SEQ ID NO: 1435 - DNA, 57 bp, synthetic construct; identical to SEQ ID NO: 737
  misc_feature 1..57: note = Description of Artificial Sequence: Synthetic oligonucleotide
  source 1..57: mol_type = other DNA

SEQ ID NO: 1436 - protein, 19 aa, synthetic construct
  REGION 1..19: note = Description of Artificial Sequence: Synthetic peptide
ATNFSLLKQAGDVEENPGP

SEQ ID NO: 1437 - DNA, 516 bp, synthetic construct; identical to SEQ ID NO: 251
  misc_feature 1..516: note = Description of Artificial Sequence: Synthetic polynucleotide
  source 1..516: mol_type = other DNA

SEQ ID NO: 1438 - protein, 172 aa, synthetic construct; identical to SEQ ID NO: 240
  REGION 1..172: note = Description of Artificial Sequence: Synthetic polypeptide

SEQ ID NO: 1439-1440 - skipped (2 entries)

SEQ ID NO: 1441 - DNA, 186 bp, synthetic construct; identical to SEQ ID NO: 255
  misc_feature 1..186: note = Description of Artificial Sequence: Synthetic polynucleotide
  source 1..186: mol_type = other DNA

SEQ ID NO: 1442 - protein, 62 aa, synthetic construct; identical to SEQ ID NO: 216
  REGION 1..62: note = Description of Artificial Sequence: Synthetic polypeptide

SEQ ID NO: 1443 - DNA, 63 bp, synthetic construct; identical to SEQ ID NO: 142
  misc_feature 1..63: note = Description of Artificial Sequence: Synthetic oligonucleotide
  source 1..63: mol_type = other DNA

SEQ ID NO: 1444 - protein, 21 aa, synthetic construct
  REGION 1..21: note = Description of Artificial Sequence: Synthetic peptide
MEFGLSWLFLVAILKGVQCSR

SEQ ID NO: 1445 - DNA, 321 bp, synthetic construct; identical to SEQ ID NO: 144
  misc_feature 1..321: note = Description of Artificial Sequence: Synthetic polynucleotide
  source 1..321: mol_type = other DNA

SEQ ID NO: 1446 - protein, 107 aa, synthetic construct; identical to SEQ ID NO: 145
  REGION 1..107: note = Description of Artificial Sequence: Synthetic polypeptide

SEQ ID NO: 1447 - DNA, 24 bp, synthetic construct
  misc_feature 1..24: note = Description of Artificial Sequence: Synthetic oligonucleotide
  source 1..24: mol_type = other DNA
ggcggaggaagcggaggtgggggc

SEQ ID NO: 1448 - protein, 8 aa, synthetic construct
  REGION 1..8: note = Description of Artificial Sequence: Synthetic peptide
GGGSGGGG

SEQ ID NO: 1449 - DNA, 360 bp, synthetic construct; identical to SEQ ID NO: 148
  misc_feature 1..360: note = Description of Artificial Sequence: Synthetic polynucleotide
  source 1..360: mol_type = other DNA

SEQ ID NO: 1450 - protein, 120 aa, synthetic construct; identical to SEQ ID NO: 149
  REGION 1..120: note = Description of Artificial Sequence: Synthetic polypeptide

SEQ ID NO: 1451-1452 - skipped (2 entries)

SEQ ID NO: 1453 - DNA, 48 bp, synthetic construct; identical to SEQ ID NO: 152
  misc_feature 1..48: note = Description of Artificial Sequence: Synthetic oligonucleotide
  source 1..48: mol_type = other DNA

SEQ ID NO: 1454 - protein, 16 aa, synthetic construct
  REGION 1..16: note = Description of Artificial Sequence: Synthetic peptide
ELPTQGTFSNVSTNVS

SEQ ID NO: 1455 - DNA, 126 bp, synthetic construct; identical to SEQ ID NO: 154
  misc_feature 1..126: note = Description of Artificial Sequence: Synthetic polynucleotide
  source 1..126: mol_type = other DNA

SEQ ID NO: 1456 - protein, 42 aa, synthetic construct; identical to SEQ ID NO: 155
  REGION 1..42: note = Description of Artificial Sequence: Synthetic polypeptide

SEQ ID NO: 1457 - DNA, 111 bp, synthetic construct; identical to SEQ ID NO: 156
  misc_feature 1..111: note = Description of Artificial Sequence: Synthetic polynucleotide
  source 1..111: mol_type = other DNA

SEQ ID NO: 1458 - protein, 37 aa, synthetic construct; identical to SEQ ID NO: 157
  REGION 1..37: note = Description of Artificial Sequence: Synthetic polypeptide

SEQ ID NO: 1459-1460 - skipped (2 entries)

SEQ ID NO: 1461 - DNA, 336 bp, synthetic construct; identical to SEQ ID NO: 426
  misc_feature 1..336: note = Description of Artificial Sequence: Synthetic polynucleotide
  source 1..336: mol_type = other DNA

SEQ ID NO: 1462 - protein, 112 aa, synthetic construct; identical to SEQ ID NO: 161
  REGION 1..112: note = Description of Artificial Sequence: Synthetic polypeptide

SEQ ID NO: 1463 - DNA, 57 bp, synthetic construct; identical to SEQ ID NO: 737
  misc_feature 1..57: note = Description of Artificial Sequence: Synthetic oligonucleotide
  source 1..57: mol_type = other DNA

SEQ ID NO: 1464 - protein, 19 aa, synthetic construct
  REGION 1..19: note = Description of Artificial Sequence: Synthetic peptide
ATNFSLLKQAGDVEENPGP

SEQ ID NO: 1465 - DNA, 516 bp, synthetic construct; identical to SEQ ID NO: 251
  misc_feature 1..516: note = Description of Artificial Sequence: Synthetic polynucleotide
  source 1..516: mol_type = other DNA

SEQ ID NO: 1466 - protein, 172 aa, synthetic construct; identical to SEQ ID NO: 240
  REGION 1..172: note = Description of Artificial Sequence: Synthetic polypeptide

SEQ ID NO: 1467-1468 - skipped (2 entries)

SEQ ID NO: 1469 - DNA, 186 bp, synthetic construct; identical to SEQ ID NO: 255
  misc_feature 1..186: note = Description of Artificial Sequence: Synthetic polynucleotide
  source 1..186: mol_type = other DNA

SEQ ID NO: 1470 - protein, 62 aa, synthetic construct; identical to SEQ ID NO: 216
  REGION 1..62: note = Description of Artificial Sequence: Synthetic polypeptide

SEQ ID NO: 1471 - DNA, 321 bp, synthetic construct; identical to SEQ ID NO: 757
  misc_feature 1..321: note = Description of Artificial Sequence: Synthetic polynucleotide
  source 1..321: mol_type = other DNA

SEQ ID NO: 1472 - protein, 107 aa, synthetic construct; identical to SEQ ID NO: 3
  REGION 1..107: note = Description of Artificial Sequence: Synthetic polypeptide

SEQ ID NO: 1473-1474 - skipped (2 entries)

SEQ ID NO: 1475 - DNA, 321 bp, synthetic construct; identical to SEQ ID NO: 761
  misc_feature 1..321: note = Description of Artificial Sequence: Synthetic polynucleotide
  source 1..321: mol_type = other DNA

SEQ ID NO: 1476 - protein, 107 aa, synthetic construct; identical to SEQ ID NO: 3
  REGION 1..107: note = Description of Artificial Sequence: Synthetic polypeptide

SEQ ID NO: 1477 - DNA, 516 bp, synthetic construct; identical to SEQ ID NO: 251
  misc_feature 1..516: note = Description of Artificial Sequence: Synthetic polynucleotide
  source 1..516: mol_type = other DNA

SEQ ID NO: 1478 - protein, 172 aa, synthetic construct; identical to SEQ ID NO: 240
  REGION 1..172: note = Description of Artificial Sequence: Synthetic polypeptide

SEQ ID NO: 1479-1480 - skipped (2 entries)

SEQ ID NO: 1481 - DNA, 186 bp, synthetic construct; identical to SEQ ID NO: 255
  misc_feature 1..186: note = Description of Artificial Sequence: Synthetic polynucleotide
  source 1..186: mol_type = other DNA

SEQ ID NO: 1482 - protein, 62 aa, synthetic construct; identical to SEQ ID NO: 216
  REGION 1..62: note = Description of Artificial Sequence: Synthetic polypeptide

SEQ ID NO: 1483 - DNA, 15 bp, synthetic construct
  misc_feature 1..15: note = Description of Artificial Sequence: Synthetic oligonucleotide
  source 1..15: mol_type = other DNA
ggatctggaccgcgg

SEQ ID NO: 1484 - protein, 5 aa, synthetic construct
  REGION 1..5: note = Description of Artificial Sequence: Synthetic peptide
GSGPR

SEQ ID NO: 1485 - DNA, 54 bp, synthetic construct; identical to SEQ ID NO: 138
  misc_feature 1..54: note = Description of Artificial Sequence: Synthetic oligonucleotide
  source 1..54: mol_type = other DNA

SEQ ID NO: 1486 - protein, 18 aa, synthetic construct
  REGION 1..18: note = Description of Artificial Sequence: Synthetic peptide
EGRGSLLTCGDVEENPGP

SEQ ID NO: 1487-1488 - skipped (2 entries)

SEQ ID NO: 1489 - DNA, 63 bp, synthetic construct; identical to SEQ ID NO: 142
  misc_feature 1..63: note = Description of Artificial Sequence: Synthetic oligonucleotide
  source 1..63: mol_type = other DNA

SEQ ID NO: 1490 - protein, 21 aa, synthetic construct
  REGION 1..21: note = Description of Artificial Sequence: Synthetic peptide
MEFGLSWLFLVAILKGVQCSR

SEQ ID NO: 1491 - DNA, 321 bp, synthetic construct; identical to SEQ ID NO: 144
  misc_feature 1..321: note = Description of Artificial Sequence: Synthetic polynucleotide
  source 1..321: mol_type = other DNA

SEQ ID NO: 1492 - protein, 107 aa, synthetic construct; identical to SEQ ID NO: 145
  REGION 1..107: note = Description of Artificial Sequence: Synthetic polypeptide

SEQ ID NO: 1493 - DNA, 24 bp, synthetic construct
  misc_feature 1..24: note = Description of Artificial Sequence: Synthetic oligonucleotide
  source 1..24: mol_type = other DNA
ggcggaggaagcggaggtgggggc

SEQ ID NO: 1494 - protein, 8 aa, synthetic construct
  REGION 1..8: note = Description of Artificial Sequence: Synthetic peptide
GGGSGGGG

SEQ ID NO: 1495 - DNA, 360 bp, synthetic construct; identical to SEQ ID NO: 148
  misc_feature 1..360: note = Description of Artificial Sequence: Synthetic polynucleotide
  source 1..360: mol_type = other DNA

SEQ ID NO: 1496 - protein, 120 aa, synthetic construct; identical to SEQ ID NO: 149
  REGION 1..120: note = Description of Artificial Sequence: Synthetic polypeptide

SEQ ID NO: 1497-1498 - skipped (2 entries)

SEQ ID NO: 1499 - DNA, 48 bp, synthetic construct; identical to SEQ ID NO: 152
  misc_feature 1..48: note = Description of Artificial Sequence: Synthetic oligonucleotide
  source 1..48: mol_type = other DNA

SEQ ID NO: 1500 - protein, 16 aa, synthetic construct
  REGION 1..16: note = Description of Artificial Sequence: Synthetic peptide
ELPTQGTFSNVSTNVS

SEQ ID NO: 1501 - DNA, 126 bp, synthetic construct; identical to SEQ ID NO: 154
  misc_feature 1..126: note = Description of Artificial Sequence: Synthetic polynucleotide
  source 1..126: mol_type = other DNA

SEQ ID NO: 1502 - protein, 42 aa, synthetic construct; identical to SEQ ID NO: 155
  REGION 1..42: note = Description of Artificial Sequence: Synthetic polypeptide

SEQ ID NO: 1503 - DNA, 111 bp, synthetic construct; identical to SEQ ID NO: 156
  misc_feature 1..111: note = Description of Artificial Sequence: Synthetic polynucleotide
  source 1..111: mol_type = other DNA

SEQ ID NO: 1504 - protein, 37 aa, synthetic construct; identical to SEQ ID NO: 157
  REGION 1..37: note = Description of Artificial Sequence: Synthetic polypeptide

SEQ ID NO: 1505-1506 - skipped (2 entries)

SEQ ID NO: 1507 - DNA, 336 bp, synthetic construct; identical to SEQ ID NO: 426
  misc_feature 1..336: note = Description of Artificial Sequence: Synthetic polynucleotide
  source 1..336: mol_type = other DNA

SEQ ID NO: 1508 - protein, 112 aa, synthetic construct; identical to SEQ ID NO: 161
  REGION 1..112: note = Description of Artificial Sequence: Synthetic polypeptide

SEQ ID NO: 1509 - DNA, 516 bp, synthetic construct; identical to SEQ ID NO: 251
  misc_feature 1..516: note = Description of Artificial Sequence: Synthetic polynucleotide
  source 1..516: mol_type = other DNA

SEQ ID NO: 1510 - protein, 172 aa, synthetic construct; identical to SEQ ID NO: 240
  REGION 1..172: note = Description of Artificial Sequence: Synthetic polypeptide

SEQ ID NO: 1511-1512 - skipped (2 entries)

SEQ ID NO: 1513 - DNA, 186 bp, synthetic construct; identical to SEQ ID NO: 255
  misc_feature 1..186: note = Description of Artificial Sequence: Synthetic polynucleotide
  source 1..186: mol_type = other DNA

SEQ ID NO: 1514 - protein, 62 aa, synthetic construct; identical to SEQ ID NO: 216
  REGION 1..62: note = Description of Artificial Sequence: Synthetic polypeptide

SEQ ID NO: 1515-1516 - skipped (2 entries)

SEQ ID NO: 1517 - DNA, 321 bp, synthetic construct; identical to SEQ ID NO: 317
  misc_feature 1..321: note = Description of Artificial Sequence: Synthetic polynucleotide
  source 1..321: mol_type = other DNA

SEQ ID NO: 1518 - protein, 107 aa, synthetic construct; identical to SEQ ID NO: 3
  REGION 1..107: note = Description of Artificial Sequence: Synthetic polypeptide

SEQ ID NO: 1519 - DNA, 15 bp, synthetic construct
  misc_feature 1..15: note = Description of Artificial Sequence: Synthetic oligonucleotide
  source 1..15: mol_type = other DNA
ggatctggaccgcgg

SEQ ID NO: 1520 - protein, 5 aa, synthetic construct
  REGION 1..5: note = Description of Artificial Sequence: Synthetic peptide
GSGPR

SEQ ID NO: 1521 - DNA, 54 bp, synthetic construct; identical to SEQ ID NO: 138
  misc_feature 1..54: note = Description of Artificial Sequence: Synthetic oligonucleotide
  source 1..54: mol_type = other DNA

SEQ ID NO: 1522 - protein, 18 aa, synthetic construct
  REGION 1..18: note = Description of Artificial Sequence: Synthetic peptide
EGRGSLLTCGDVEENPGP

SEQ ID NO: 1523-1524 - skipped (2 entries)

SEQ ID NO: 1525 - DNA, 63 bp, synthetic construct; identical to SEQ ID NO: 142
  misc_feature 1..63: note = Description of Artificial Sequence: Synthetic oligonucleotide
  source 1..63: mol_type = other DNA

SEQ ID NO: 1526 - protein, 21 aa, synthetic construct
  REGION 1..21: note = Description of Artificial Sequence: Synthetic peptide
MEFGLSWLFLVAILKGVQCSR

SEQ ID NO: 1527 - DNA, 321 bp, synthetic construct; identical to SEQ ID NO: 144
  misc_feature 1..321: note = Description of Artificial Sequence: Synthetic polynucleotide
  source 1..321: mol_type = other DNA

SEQ ID NO: 1528 - protein, 107 aa, synthetic construct; identical to SEQ ID NO: 145
  REGION 1..107: note = Description of Artificial Sequence: Synthetic polypeptide

SEQ ID NO: 1529 - DNA, 24 bp, synthetic construct
  misc_feature 1..24: note = Description of Artificial Sequence: Synthetic oligonucleotide
  source 1..24: mol_type = other DNA
ggcggaggaagcggaggtgggggc

SEQ ID NO: 1530 - protein, 8 aa, synthetic construct
  REGION 1..8: note = Description of Artificial Sequence: Synthetic peptide
GGGSGGGG

SEQ ID NO: 1531 - DNA, 360 bp, synthetic construct; identical to SEQ ID NO: 148
  misc_feature 1..360: note = Description of Artificial Sequence: Synthetic polynucleotide
  source 1..360: mol_type = other DNA

SEQ ID NO: 1532 - protein, 120 aa, synthetic construct; identical to SEQ ID NO: 149
  REGION 1..120: note = Description of Artificial Sequence: Synthetic polypeptide

SEQ ID NO: 1533-1534 - skipped (2 entries)

SEQ ID NO: 1535 - DNA, 48 bp, synthetic construct; identical to SEQ ID NO: 152
  misc_feature 1..48: note = Description of Artificial Sequence: Synthetic oligonucleotide
  source 1..48: mol_type = other DNA

SEQ ID NO: 1536 - protein, 16 aa, synthetic construct
  REGION 1..16: note = Description of Artificial Sequence: Synthetic peptide
ELPTQGTFSNVSTNVS

SEQ ID NO: 1537 - DNA, 126 bp, synthetic construct; identical to SEQ ID NO: 154
  misc_feature 1..126: note = Description of Artificial Sequence: Synthetic polynucleotide
  source 1..126: mol_type = other DNA

SEQ ID NO: 1538 - protein, 42 aa, synthetic construct; identical to SEQ ID NO: 155
  REGION 1..42: note = Description of Artificial Sequence: Synthetic polypeptide

SEQ ID NO: 1539 - DNA, 111 bp, synthetic construct; identical to SEQ ID NO: 156
  misc_feature 1..111: note = Description of Artificial Sequence: Synthetic polynucleotide
  source 1..111: mol_type = other DNA

SEQ ID NO: 1540 - protein, 37 aa, synthetic construct; identical to SEQ ID NO: 157
  REGION 1..37: note = Description of Artificial Sequence: Synthetic polypeptide

SEQ ID NO: 1541-1542 - skipped (2 entries)

SEQ ID NO: 1543 - DNA, 336 bp, synthetic construct; identical to SEQ ID NO: 426
  misc_feature 1..336: note = Description of Artificial Sequence: Synthetic polynucleotide
  source 1..336: mol_type = other DNA

SEQ ID NO: 1544 - protein, 112 aa, synthetic construct; identical to SEQ ID NO: 161
  REGION 1..112: note = Description of Artificial Sequence: Synthetic polypeptide

SEQ ID NO: 1545 - DNA, 516 bp, synthetic construct; identical to SEQ ID NO: 251
  misc_feature 1..516: note = Description of Artificial Sequence: Synthetic polynucleotide
  source 1..516: mol_type = other DNA

SEQ ID NO: 1546 - protein, 172 aa, synthetic construct; identical to SEQ ID NO: 240
  REGION 1..172: note = Description of Artificial Sequence: Synthetic polypeptide

SEQ ID NO: 1547-1548 - skipped (2 entries)

SEQ ID NO: 1549 - DNA, 186 bp, synthetic construct; identical to SEQ ID NO: 255
  misc_feature 1..186: note = Description of Artificial Sequence: Synthetic polynucleotide
  source 1..186: mol_type = other DNA

SEQ ID NO: 1550 - protein, 62 aa, synthetic construct; identical to SEQ ID NO: 216
  REGION 1..62: note = Description of Artificial Sequence: Synthetic polypeptide

SEQ ID NO: 1551-1552 - skipped (2 entries)

SEQ ID NO: 1553 - DNA, 321 bp, synthetic construct
  misc_feature 1..321: note = Description of Artificial Sequence: Synthetic polynucleotide
  source 1..321: mol_type = other DNA
ggcgtccaagtcgaaaccattagtcccggcgatggcagaacatttcctacaaggggacaaacatgtgtcgtccattatacaggcatgttggaggacggcaaaaagttcgacagtagtagagatcgcaataaacctttcaaattcatgttgggaaaacaagaagtcattaggggatgggaggagggcgtggctcaaatgtccgtcggccaacgcgctaagctcaccatcagccccgactacgcatacggcgctaccggacatcccggaattattccccctcacgctaccttggtgtttgacgtcgaactgttgaagctcgaa

SEQ ID NO: 1554 - protein, 107 aa, synthetic construct; identical to SEQ ID NO: 929
  REGION 1..107: note = Description of Artificial Sequence: Synthetic polypeptide

SEQ ID NO: 1555-1556 - skipped (2 entries)

SEQ ID NO: 1557 - DNA, 273 bp, synthetic construct
  misc_feature 1..273: note = Description of Artificial Sequence: Synthetic polynucleotide
  source 1..273: mol_type = other DNA
caattggaaatgtggcatgaagggttggaagaagcttcaaggctgtacttcggagagaggaacgtgaagggcatgtttgaggttcttgaacctctgcacgccatgatggaacggggaccgcagacactgaaagaaacctcttttaatcaggcctacggcagagacctgatggaggcccaagaatggtgtagaaagtatatgaaatccggtaacgtgaaagacctgctccaggcctgggacctttattaccatgtgttcaggcggatcagtaag

SEQ ID NO: 1558 - protein, 91 aa, synthetic construct
  REGION 1..91: note = Description of Artificial Sequence: Synthetic polypeptide
QLEMWHEGLEEASRLYFGERNVKGMFEVLEPLHAMMERGPQTLKETSFNQAYGRDLMEAQEWCRKYMKSGNVKDLLQAWDLYYHVFRRISK

SEQ ID NO: 1559-1560 - skipped (2 entries)

SEQ ID NO: 1561 - DNA, 54 bp, synthetic construct; identical to SEQ ID NO: 138
  misc_feature 1..54: note = Description of Artificial Sequence: Synthetic oligonucleotide
  source 1..54: mol_type = other DNA

SEQ ID NO: 1562 - protein, 18 aa, synthetic construct
  REGION 1..18: note = Description of Artificial Sequence: Synthetic peptide
EGRGSLLTCGDVEENPGP

SEQ ID NO: 1563-1564 - skipped (2 entries)

SEQ ID NO: 1565 - DNA, 63 bp, synthetic construct; identical to SEQ ID NO: 142
  misc_feature 1..63: note = Description of Artificial Sequence: Synthetic oligonucleotide
  source 1..63: mol_type = other DNA

SEQ ID NO: 1566 - protein, 21 aa, synthetic construct
  REGION 1..21: note = Description of Artificial Sequence: Synthetic peptide
MEFGLSWLFLVAILKGVQCSR

SEQ ID NO: 1567 - DNA, 321 bp, synthetic construct; identical to SEQ ID NO: 144
  misc_feature 1..321: note = Description of Artificial Sequence: Synthetic polynucleotide
  source 1..321: mol_type = other DNA

SEQ ID NO: 1568 - protein, 107 aa, synthetic construct; identical to SEQ ID NO: 145
  REGION 1..107: note = Description of Artificial Sequence: Synthetic polypeptide

SEQ ID NO: 1569 - DNA, 24 bp, synthetic construct
  misc_feature 1..24: note = Description of Artificial Sequence: Synthetic oligonucleotide
  source 1..24: mol_type = other DNA
ggcggaggaagcggaggtgggggc

SEQ ID NO: 1570 - protein, 8 aa, synthetic construct
  REGION 1..8: note = Description of Artificial Sequence: Synthetic peptide
GGGSGGGG

SEQ ID NO: 1571 - DNA, 360 bp, synthetic construct; identical to SEQ ID NO: 148
  misc_feature 1..360: note = Description of Artificial Sequence: Synthetic polynucleotide
  source 1..360: mol_type = other DNA

SEQ ID NO: 1572 - protein, 120 aa, synthetic construct; identical to SEQ ID NO: 149
  REGION 1..120: note = Description of Artificial Sequence: Synthetic polypeptide

SEQ ID NO: 1573-1574 - skipped (2 entries)

SEQ ID NO: 1575 - DNA, 48 bp, synthetic construct; identical to SEQ ID NO: 152
  misc_feature 1..48: note = Description of Artificial Sequence: Synthetic oligonucleotide
  source 1..48: mol_type = other DNA

SEQ ID NO: 1576 - protein, 16 aa, synthetic construct
  REGION 1..16: note = Description of Artificial Sequence: Synthetic peptide
ELPTQGTFSNVSTNVS

SEQ ID NO: 1577 - DNA, 126 bp, synthetic construct; identical to SEQ ID NO: 154
  misc_feature 1..126: note = Description of Artificial Sequence: Synthetic polynucleotide
  source 1..126: mol_type = other DNA

SEQ ID NO: 1578 - protein, 42 aa, synthetic construct; identical to SEQ ID NO: 155
  REGION 1..42: note = Description of Artificial Sequence: Synthetic polypeptide

SEQ ID NO: 1579 - DNA, 111 bp, synthetic construct; identical to SEQ ID NO: 156
  misc_feature 1..111: note = Description of Artificial Sequence: Synthetic polynucleotide
  source 1..111: mol_type = other DNA

SEQ ID NO: 1580 - protein, 37 aa, synthetic construct; identical to SEQ ID NO: 157
  REGION 1..37: note = Description of Artificial Sequence: Synthetic polypeptide

SEQ ID NO: 1581-1582 - skipped (2 entries)

SEQ ID NO: 1583 - DNA, 336 bp, synthetic construct; identical to SEQ ID NO: 426
  misc_feature 1..336: note = Description of Artificial Sequence: Synthetic polynucleotide
  source 1..336: mol_type = other DNA

SEQ ID NO: 1584 - protein, 112 aa, synthetic construct; identical to SEQ ID NO: 161
  REGION 1..112: note = Description of Artificial Sequence: Synthetic polypeptide

SEQ ID NO: 1585-1586 - skipped (2 entries)

SEQ ID NO: 1587 - DNA, 54 bp, synthetic construct; identical to SEQ ID NO: 138
  misc_feature 1..54: note = Description of Artificial Sequence: Synthetic oligonucleotide
  source 1..54: mol_type = other DNA

SEQ ID NO: 1588 - protein, 18 aa, synthetic construct
  REGION 1..18: note = Description of Artificial Sequence: Synthetic peptide
EGRGSLLTCGDVEENPGP

SEQ ID NO: 1589-1590 - skipped (2 entries)

SEQ ID NO: 1591 - DNA, 57 bp, synthetic construct; identical to SEQ ID NO: 1283
  misc_feature 1..57: note = Description of Artificial Sequence: Synthetic oligonucleotide
  source 1..57: mol_type = other DNA

SEQ ID NO: 1592 - protein, 19 aa, synthetic construct
  REGION 1..19: note = Description of Artificial Sequence: Synthetic peptide
ATNFSLLKQAGDVEENPGP

SEQ ID NO: 1593 - DNA, 516 bp, synthetic construct; identical to SEQ ID NO: 251
  misc_feature 1..516: note = Description of Artificial Sequence: Synthetic polynucleotide
  source 1..516: mol_type = other DNA

SEQ ID NO: 1594 - protein, 172 aa, synthetic construct; identical to SEQ ID NO: 240
  REGION 1..172: note = Description of Artificial Sequence: Synthetic polypeptide

SEQ ID NO: 1595-1596 - skipped (2 entries)

SEQ ID NO: 1597 - DNA, 186 bp, synthetic construct; identical to SEQ ID NO: 255
  misc_feature 1..186: note = Description of Artificial Sequence: Synthetic polynucleotide
  source 1..186: mol_type = other DNA

SEQ ID NO: 1598 - protein, 62 aa, synthetic construct; identical to SEQ ID NO: 216
  REGION 1..62: note = Description of Artificial Sequence: Synthetic polypeptide

SEQ ID NO: 1599-1602 - skipped (4 entries)

SEQ ID NO: 1603 - DNA, 27 bp, synthetic construct
  misc_feature 1..27: note = Description of Artificial Sequence: Synthetic oligonucleotide
  source 1..27: mol_type = other DNA
tcaggcggtggctcaggtccgcggtga

SEQ ID NO: 1604 - protein, 8 aa, synthetic construct
  REGION 1..8: note = Description of Artificial Sequence: Synthetic peptide
SGGGSGPR

SEQ ID NO: 1605 - DNA, 18 bp, synthetic construct
  misc_feature 1..18: note = Description of Artificial Sequence: Synthetic oligonucleotide
  source 1..18: mol_type = other DNA
atgctcgagcaattggag

SEQ ID NO: 1606 - protein, 6 aa, synthetic construct
  REGION 1..6: note = Description of Artificial Sequence: Synthetic peptide
MLEQLE

SEQ ID NO: 1607 - DNA, 321 bp, synthetic construct; identical to SEQ ID NO: 317
  misc_feature 1..321: note = Description of Artificial Sequence: Synthetic polynucleotide
  source 1..321: mol_type = other DNA

SEQ ID NO: 1608 - protein, 107 aa, synthetic construct; identical to SEQ ID NO: 3
  REGION 1..107: note = Description of Artificial Sequence: Synthetic polypeptide

SEQ ID NO: 1609 - DNA, 24 bp, synthetic construct
  misc_feature 1..24: note = Description of Artificial Sequence: Synthetic oligonucleotide
  source 1..24: mol_type = other DNA
tcaggcggtggctcaggtgtggac

SEQ ID NO: 1610 - protein, 8 aa, synthetic construct
  REGION 1..8: note = Description of Artificial Sequence: Synthetic peptide
SGGGSGVD

SEQ ID NO: 1611 - DNA, 858 bp, synthetic construct; identical to SEQ ID NO: 936
  misc_feature 1..858: note = Description of Artificial Sequence: Synthetic polynucleotide
  source 1..858: mol_type = other DNA

SEQ ID NO: 1612 - protein, 286 aa, synthetic construct; identical to SEQ ID NO: 937
  REGION 1..286: note = Description of Artificial Sequence: Synthetic polypeptide

SEQ ID NO: 1613 - DNA, 15 bp, synthetic construct
  misc_feature 1..15: note = Description of Artificial Sequence: Synthetic oligonucleotide
  source 1..15: mol_type = other DNA
ggatctggaccgcgg

SEQ ID NO: 1614 - protein, 5 aa, synthetic construct
  REGION 1..5: note = Description of Artificial Sequence: Synthetic peptide
GSGPR

SEQ ID NO: 1615 - DNA, 54 bp, synthetic construct; identical to SEQ ID NO: 138
  misc_feature 1..54: note = Description of Artificial Sequence: Synthetic oligonucleotide
  source 1..54: mol_type = other DNA

SEQ ID NO: 1616 - protein, 18 aa, synthetic construct
  REGION 1..18: note = Description of Artificial Sequence: Synthetic peptide
EGRGSLLTCGDVEENPGP

SEQ ID NO: 1617-1618 - skipped (2 entries)

SEQ ID NO: 1619 - DNA, 63 bp, synthetic construct; identical to SEQ ID NO: 142
  misc_feature 1..63: note = Description of Artificial Sequence: Synthetic oligonucleotide
  source 1..63: mol_type = other DNA

SEQ ID NO: 1620 - protein, 21 aa, synthetic construct
  REGION 1..21: note = Description of Artificial Sequence: Synthetic peptide
MEFGLSWLFLVAILKGVQCSR

SEQ ID NO: 1621 - DNA, 321 bp, synthetic construct; identical to SEQ ID NO: 144
  misc_feature 1..321: note = Description of Artificial Sequence: Synthetic polynucleotide
  source 1..321: mol_type = other DNA

SEQ ID NO: 1622 - protein, 107 aa, synthetic construct; identical to SEQ ID NO: 145
  REGION 1..107: note = Description of Artificial Sequence: Synthetic polypeptide

SEQ ID NO: 1623 - DNA, 24 bp, synthetic construct
  misc_feature 1..24: note = Description of Artificial Sequence: Synthetic oligonucleotide
  source 1..24: mol_type = other DNA
ggcggaggaagcggaggtgggggc

SEQ ID NO: 1624 - protein, 8 aa, synthetic construct
  REGION 1..8: note = Description of Artificial Sequence: Synthetic peptide
GGGSGGGG

SEQ ID NO: 1625 - DNA, 360 bp, synthetic construct; identical to SEQ ID NO: 148
  misc_feature 1..360: note = Description of Artificial Sequence: Synthetic polynucleotide
  source 1..360: mol_type = other DNA

SEQ ID NO: 1626 - protein, 120 aa, synthetic construct; identical to SEQ ID NO: 149
  REGION 1..120: note = Description of Artificial Sequence: Synthetic polypeptide

SEQ ID NO: 1627-1628 - skipped (2 entries)

SEQ ID NO: 1629 - DNA, 48 bp, synthetic construct; identical to SEQ ID NO: 152
  misc_feature 1..48: note = Description of Artificial Sequence: Synthetic oligonucleotide
  source 1..48: mol_type = other DNA

SEQ ID NO: 1630 - protein, 16 aa, synthetic construct
  REGION 1..16: note = Description of Artificial Sequence: Synthetic peptide
ELPTQGTFSNVSTNVS

SEQ ID NO: 1631 - DNA, 126 bp, synthetic construct; identical to SEQ ID NO: 154
  misc_feature 1..126: note = Description of Artificial Sequence: Synthetic polynucleotide
  source 1..126: mol_type = other DNA

SEQ ID NO: 1632 - protein, 42 aa, synthetic construct; identical to SEQ ID NO: 155
  REGION 1..42: note = Description of Artificial Sequence: Synthetic polypeptide

SEQ ID NO: 1633 - DNA, 111 bp, synthetic construct; identical to SEQ ID NO: 156
  misc_feature 1..111: note = Description of Artificial Sequence: Synthetic polynucleotide
  source 1..111: mol_type = other DNA

SEQ ID NO: 1634 - protein, 37 aa, synthetic construct; identical to SEQ ID NO: 157
  REGION 1..37: note = Description of Artificial Sequence: Synthetic polypeptide

SEQ ID NO: 1635-1636 - skipped (2 entries)

SEQ ID NO: 1637 - DNA, 336 bp, synthetic construct; identical to SEQ ID NO: 426
  misc_feature 1..336: note = Description of Artificial Sequence: Synthetic polynucleotide
  source 1..336: mol_type = other DNA

SEQ ID NO: 1638 - protein, 112 aa, synthetic construct; identical to SEQ ID NO: 161
  REGION 1..112: note = Description of Artificial Sequence: Synthetic polypeptide

SEQ ID NO: 1639-1640 - skipped (2 entries)

SEQ ID NO: 1641 - DNA, 54 bp, synthetic construct; identical to SEQ ID NO: 138
  misc_feature 1..54: note = Description of Artificial Sequence: Synthetic oligonucleotide
  source 1..54: mol_type = other DNA

SEQ ID NO: 1642 - protein, 18 aa, synthetic construct
  REGION 1..18: note = Description of Artificial Sequence: Synthetic peptide
EGRGSLLTCGDVEENPGP

SEQ ID NO: 1643-1644 - skipped (2 entries)

SEQ ID NO: 1645 - DNA, 57 bp, synthetic construct; identical to SEQ ID NO: 1283
  misc_feature 1..57: note = Description of Artificial Sequence: Synthetic oligonucleotide
  source 1..57: mol_type = other DNA

SEQ ID NO: 1646 - protein, 19 aa, synthetic construct
  REGION 1..19: note = Description of Artificial Sequence: Synthetic peptide
ATNFSLLKQAGDVEENPGP

SEQ ID NO: 1647 - DNA, 516 bp, synthetic construct; identical to SEQ ID NO: 251
  misc_feature 1..516: note = Description of Artificial Sequence: Synthetic polynucleotide
  source 1..516: mol_type = other DNA

SEQ ID NO: 1648 - protein, 172 aa, synthetic construct; identical to SEQ ID NO: 240
  REGION 1..172: note = Description of Artificial Sequence: Synthetic polypeptide

SEQ ID NO: 1649-1650 - skipped (2 entries)

SEQ ID NO: 1651 - DNA, 186 bp, synthetic construct; identical to SEQ ID NO: 255
  misc_feature 1..186: note = Description of Artificial Sequence: Synthetic polynucleotide
  source 1..186: mol_type = other DNA

SEQ ID NO: 1652 - protein, 62 aa, synthetic construct; identical to SEQ ID NO: 216
  REGION 1..62: note = Description of Artificial Sequence: Synthetic polypeptide

SEQ ID NO: 1653-1654 - skipped (2 entries)

SEQ ID NO: 1655 - DNA, 321 bp, synthetic construct; identical to SEQ ID NO: 1553
  misc_feature 1..321: note = Description of Artificial Sequence: Synthetic polynucleotide
  source 1..321: mol_type = other DNA

SEQ ID NO: 1656 - protein, 107 aa, synthetic construct; identical to SEQ ID NO: 929
  REGION 1..107: note = Description of Artificial Sequence: Synthetic polypeptide

SEQ ID NO: 1657-1658 - skipped (2 entries)

SEQ ID NO: 1659 - DNA, 273 bp, synthetic construct; identical to SEQ ID NO: 1557
  misc_feature 1..273: note = Description of Artificial Sequence: Synthetic polynucleotide
  source 1..273: mol_type = other DNA

SEQ ID NO: 1660 - protein, 91 aa, synthetic construct; identical to SEQ ID NO: 1558
  REGION 1..91: note = Description of Artificial Sequence: Synthetic polypeptide

SEQ ID NO: 1661 - DNA, 27 bp, synthetic construct
  misc_feature 1..27: note = Description of Artificial Sequence: Synthetic oligonucleotide
  source 1..27: mol_type = other DNA
tcaggcggtggctcaggtccgcggtga

SEQ ID NO: 1662 - protein, 8 aa, synthetic construct
  REGION 1..8: note = Description of Artificial Sequence: Synthetic peptide
SGGGSGPR

SEQ ID NO: 1663 - DNA, 516 bp, synthetic construct; identical to SEQ ID NO: 251
  misc_feature 1..516: note = Description of Artificial Sequence: Synthetic polynucleotide
  source 1..516: mol_type = other DNA

SEQ ID NO: 1664 - protein, 172 aa, synthetic construct; identical to SEQ ID NO: 240
  REGION 1..172: note = Description of Artificial Sequence: Synthetic polypeptide

SEQ ID NO: 1665-1666 - skipped (2 entries)

SEQ ID NO: 1667 - DNA, 186 bp, synthetic construct; identical to SEQ ID NO: 255
  misc_feature 1..186: note = Description of Artificial Sequence: Synthetic polynucleotide
  source 1..186: mol_type = other DNA

SEQ ID NO: 1668 - protein, 62 aa, synthetic construct; identical to SEQ ID NO: 216
  REGION 1..62: note = Description of Artificial Sequence: Synthetic polypeptide

SEQ ID NO: 1669-1670 - skipped (2 entries)

SEQ ID NO: 1671 - DNA, 321 bp, synthetic construct; identical to SEQ ID NO: 757
  misc_feature 1..321: note = Description of Artificial Sequence: Synthetic polynucleotide
  source 1..321: mol_type = other DNA

SEQ ID NO: 1672 - protein, 107 aa, synthetic construct; identical to SEQ ID NO: 3
  REGION 1..107: note = Description of Artificial Sequence: Synthetic polypeptide

SEQ ID NO: 1673-1674 - skipped (2 entries)

SEQ ID NO: 1675 - DNA, 321 bp, synthetic construct; identical to SEQ ID NO: 761
  misc_feature 1..321: note = Description of Artificial Sequence: Synthetic polynucleotide
  source 1..321: mol_type = other DNA

SEQ ID NO: 1676 - protein, 107 aa, synthetic construct; identical to SEQ ID NO: 3
  REGION 1..107: note = Description of Artificial Sequence: Synthetic polypeptide

SEQ ID NO: 1677-1678 - skipped (2 entries)

SEQ ID NO: 1679 - DNA, 54 bp, synthetic construct
  misc_feature 1..54: note = Description of Artificial Sequence: Synthetic oligonucleotide
  source 1..54: mol_type = other DNA
gagggcagaggcagcctcctgacatgtggggacgtcgaggagaaccctggccca

SEQ ID NO: 1680 - protein, 18 aa, synthetic construct
  REGION 1..18: note = Description of Artificial Sequence: Synthetic peptide
EGRGSLLTCGDVEENPGP

SEQ ID NO: 1681-1682 - skipped (2 entries)

SEQ ID NO: 1683 - DNA, 63 bp, synthetic construct
  misc_feature 1..63: note = Description of Artificial Sequence: Synthetic oligonucleotide
  source 1..63: mol_type = other DNA
atggagttcggattgagctggctgttcctggtggcaatactcaagggcgttcaatgttcacgg

SEQ ID NO: 1684 - protein, 21 aa, synthetic construct
  REGION 1..21: note = Description of Artificial Sequence: Synthetic peptide
MEFGLSWLFLVAILKGVQCSR

SEQ ID NO: 1685 - DNA, 339 bp, synthetic construct
  misc_feature 1..339: note = Description of Artificial Sequence: Synthetic polynucleotide
  source 1..339: mol_type = other DNA
gaaattgtgctgactcagagcccgggtagcctggccgtgtcccccggagagcgagtgaccatgagctgtaaatccagccaatcagtttttttttcatcatctcaaaaaaactatctggcatggtaccaacagatacccgggcagtccccacggctgctgatttactgggcatcaacacgcgagagcggtgtgcccgacagattcaccggaagcgggagcggcacggacttcacacttaccatctcaagcgtacaaccggaggacttggctatctattactgccaccaatatctttcctccagaacattcggacagggaacgaaactggagatcaaaaga

SEQ ID NO: 1686 - protein, 113 aa, synthetic construct
  REGION 1..113: note = Description of Artificial Sequence: Synthetic polypeptide
EIVLTQSPGSLAVSPGERVTMSCKSSQSVFFSSSQKNYLAWYQQIPGQSPRLLIYWASTRESGVPDRFTGSGSGTDFTLTISSVQPEDLAIYYCHQYLSSRTFGQGTKLEIKR

SEQ ID NO: 1687 - DNA, 24 bp, synthetic construct
  misc_feature 1..24: note = Description of Artificial Sequence: Synthetic oligonucleotide
  source 1..24: mol_type = other DNA
ggcggcgggagtgggggaggaggt

SEQ ID NO: 1688 - protein, 8 aa, synthetic construct
  REGION 1..8: note = Description of Artificial Sequence: Synthetic peptide
GGGSGGGG

SEQ ID NO: 1689-1690 - skipped (2 entries)

SEQ ID NO: 1691 - DNA, 354 bp, synthetic construct
  misc_feature 1..354: note = Description of Artificial Sequence: Synthetic polynucleotide
  source 1..354: mol_type = other DNA
caggtgcagctgcagcagcctggagccgaggtggtgaagcccggcgcatctgtgaaaatgtcttgcaaggcaagcggatatacatttactagctactacatccattggatcaagcaaacccccggacagggcctcgaatgggtgggagttatttacccggggaacgatgatatctcttataatcagaaattccaagggaaagccaccctgactgcagacaaatcaagtaccacagcctatatgcagctcagctccctgacaagcgaggattccgctgtgtactactgtgccagggaggttagacttcgatattttgatgtttgggggcagggaactaccgtgaccgtgagcagc

SEQ ID NO: 1692 - protein, 118 aa, synthetic construct
  REGION 1..118: note = Description of Artificial Sequence: Synthetic polypeptide
QVQLQQPGAEVVKPGASVKMSCKASGYTFTSYYIHWIKQTPGQGLEWVGVIYPGNDDISYNQKFQGKATLTADKSSTTAYMQLSSLTSEDSAVYYCAREVRLRYFDVWGQGTTVTVSS

SEQ ID NO: 1693-1694 - skipped (2 entries)

SEQ ID NO: 1695 - DNA, 48 bp, synthetic construct
  misc_feature 1..48: note = Description of Artificial Sequence: Synthetic oligonucleotide
  source 1..48: mol_type = other DNA
gagctgccaacccagggaactttttcaaatgtatcaactaacgtctca

SEQ ID NO: 1696 - protein, 16 aa, synthetic construct
  REGION 1..16: note = Description of Artificial Sequence: Synthetic peptide
ELPTQGTFSNVSTNVS

SEQ ID NO: 1697 - DNA, 126 bp, synthetic construct
  misc_feature 1..126: note = Description of Artificial Sequence: Synthetic polynucleotide
  source 1..126: mol_type = other DNA
cccgcgccacgaccaccaacaccagccccaaccattgcatcccagcctttgtctctccggcccgaggcttgtcgccccgccgccgggggtgccgtccatacccgaggcctggacttcgcctgcgat

SEQ ID NO: 1698 - protein, 42 aa, synthetic construct; identical to SEQ ID NO: 155
  REGION 1..42: note = Description of Artificial Sequence: Synthetic polypeptide

SEQ ID NO: 1699 - DNA, 111 bp, synthetic construct
  misc_feature 1..111: note = Description of Artificial Sequence: Synthetic polynucleotide
  source 1..111: mol_type = other DNA
atatatatttgggctcctctggccggtacctgcggcgtactgctcctgtcactggtaataaccctgtattgcaatcacaggaacagaaggagagtctgtaagtgcccccgc

SEQ ID NO: 1700 - protein, 37 aa, synthetic construct; identical to SEQ ID NO: 157
  REGION 1..37: note = Description of Artificial Sequence: Synthetic polypeptide

SEQ ID NO: 1701-1702 - skipped (2 entries)

SEQ ID NO: 1703 - DNA, 336 bp, synthetic construct; identical to SEQ ID NO: 426
  misc_feature 1..336: note = Description of Artificial Sequence: Synthetic polynucleotide
  source 1..336: mol_type = other DNA

SEQ ID NO: 1704 - protein, 112 aa, synthetic construct; identical to SEQ ID NO: 161
  REGION 1..112: note = Description of Artificial Sequence: Synthetic polypeptide

SEQ ID NO: 1705 - skipped

SEQ ID NO: 1706 - DNA, 516 bp, synthetic construct; identical to SEQ ID NO: 251
  misc_feature 1..516: note = Description of Artificial Sequence: Synthetic polynucleotide
  source 1..516: mol_type = other DNA

SEQ ID NO: 1707 - protein, 172 aa, synthetic construct; identical to SEQ ID NO: 240
  REGION 1..172: note = Description of Artificial Sequence: Synthetic polypeptide

SEQ ID NO: 1708-1709 - skipped (2 entries)

SEQ ID NO: 1710 - DNA, 186 bp, synthetic construct; identical to SEQ ID NO: 255
  misc_feature 1..186: note = Description of Artificial Sequence: Synthetic polynucleotide
  source 1..186: mol_type = other DNA

SEQ ID NO: 1711 - protein, 62 aa, synthetic construct; identical to SEQ ID NO: 216
  REGION 1..62: note = Description of Artificial Sequence: Synthetic polypeptide

SEQ ID NO: 1712-1713 - skipped (2 entries)

SEQ ID NO: 1714 - DNA, 321 bp, synthetic construct; identical to SEQ ID NO: 757
  misc_feature 1..321: note = Description of Artificial Sequence: Synthetic polynucleotide
  source 1..321: mol_type = other DNA

SEQ ID NO: 1715 - protein, 107 aa, synthetic construct; identical to SEQ ID NO: 3
  REGION 1..107: note = Description of Artificial Sequence: Synthetic polypeptide

SEQ ID NO: 1716-1717 - skipped (2 entries)

SEQ ID NO: 1718 - DNA, 321 bp, synthetic construct; identical to SEQ ID NO: 761
  misc_feature 1..321: note = Description of Artificial Sequence: Synthetic polynucleotide
  source 1..321: mol_type = other DNA

SEQ ID NO: 1719 - protein, 107 aa, synthetic construct; identical to SEQ ID NO: 3
  REGION 1..107: note = Description of Artificial Sequence: Synthetic polypeptide

SEQ ID NO: 1720-1721 - skipped (2 entries)

SEQ ID NO: 1722 - DNA, 54 bp, synthetic construct; identical to SEQ ID NO: 1679
  misc_feature 1..54: note = Description of Artificial Sequence: Synthetic oligonucleotide
  source 1..54: mol_type = other DNA

SEQ ID NO: 1723 - protein, 18 aa, synthetic construct
  REGION 1..18: note = Description of Artificial Sequence: Synthetic peptide
EGRGSLLTCGDVEENPGP

SEQ ID NO: 1724-1725 - skipped (2 entries)

SEQ ID NO: 1726 - DNA, 63 bp, synthetic construct; identical to SEQ ID NO: 1683
  misc_feature 1..63: note = Description of Artificial Sequence: Synthetic oligonucleotide
  source 1..63: mol_type = other DNA

SEQ ID NO: 1727 - protein, 21 aa, synthetic construct
  REGION 1..21: note = Description of Artificial Sequence: Synthetic peptide
MEFGLSWLFLVAILKGVQCSR

SEQ ID NO: 1728 - DNA, 348 bp, synthetic construct
  misc_feature 1..348: note = Description of Artificial Sequence: Synthetic polynucleotide
  source 1..348: mol_type = other DNA
cagatccaactggtgcagtcaggcccggaactgaagaagccaggggagacagtcaaaataagttgtaaagccagcggctacatatttactaattacgggatgaattgggtgaagcaagcgccgggcaaatcctttaaatggatggggtggataaacacatacacaggagagtcaacgtacagcgcggacttcaaaggtcgattcgcgttcagtctcgagaccagcgcgagtacagcttacctccacatcaacgatcttaaaaacgaagacacggcaacctatttttgcgcccggtcaggcggttacgaccctatggactattggggccaagggacctccgttacggta

SEQ ID NO: 1729 - protein, 116 aa, synthetic construct
  REGION 1..116: note = Description of Artificial Sequence: Synthetic polypeptide
QIQLVQSGPELKKPGETVKISCKASGYIFTNYGMNWVKQAPGKSFKWMGWINTYTGESTYSADFKGRFAFSLETSASTAYLHINDLKNEDTATYFCARSGGYDPMDYWGQGTSVTV

SEQ ID NO: 1730 - DNA, 51 bp, synthetic construct
  misc_feature 1..51: note = Description of Artificial Sequence: Synthetic oligonucleotide
  source 1..51: mol_type = other DNA
tcttcaggcggtggcgggagtggtggaggaggctcaggcggcgggggatca

SEQ ID NO: 1731 - protein, 17 aa, synthetic construct
  REGION 1..17: note = Description of Artificial Sequence: Synthetic peptide
SSGGGGSGGGGSGGGGS

SEQ ID NO: 1732 - DNA, 360 bp, synthetic construct
  misc_feature 1..360: note = Description of Artificial Sequence: Synthetic polynucleotide
  source 1..360: mol_type = other DNA
gacatcgtactgacccaatctcccgctagccttgcagtatccttgggtcaacgcgctacaataagttgccgggctagtgagtccgtagacaactatggcaacaccttcatgcattggtaccaacaaaaaccaggtcagccacccaaacttctcatttacagagcgtctaatctcgaaagcggcatccctgctcgattctctggaagcggaagtagaaccgactttacactgactataaaccccgtcgaagccgatgatgttgccacttattactgtcaacagagcaatgaggacccaccgacattcggtgctggtaccaagctggagttgaaggagtcaaaatacgggcctccctgtccc

SEQ ID NO: 1733 - protein, 120 aa, synthetic construct
  REGION 1..120: note = Description of Artificial Sequence: Synthetic polypeptide
DIVLTQSPASLAVSLGQRATISCRASESVDNYGNTFMHWYQQKPGQPPKLLIYRASNLESGIPARFSGSGSRTDFTLTINPVEADDVATYYCQQSNEDPPTFGAGTKLELKESKYGPPCP

SEQ ID NO: 1734-1735 - skipped (2 entries)

SEQ ID NO: 1736 - DNA, 48 bp, synthetic construct; identical to SEQ ID NO: 1695
  misc_feature 1..48: note = Description of Artificial Sequence: Synthetic oligonucleotide
  source 1..48: mol_type = other DNA

SEQ ID NO: 1737 - protein, 16 aa, synthetic construct
  REGION 1..16: note = Description of Artificial Sequence: Synthetic peptide
ELPTQGTFSNVSTNVS

SEQ ID NO: 1738 - DNA, 126 bp, synthetic construct; identical to SEQ ID NO: 1697
  misc_feature 1..126: note = Description of Artificial Sequence: Synthetic polynucleotide
  source 1..126: mol_type = other DNA

SEQ ID NO: 1739 - protein, 42 aa, synthetic construct; identical to SEQ ID NO: 155
  REGION 1..42: note = Description of Artificial Sequence: Synthetic polypeptide

SEQ ID NO: 1740 - DNA, 111 bp, synthetic construct; identical to SEQ ID NO: 1699
  misc_feature 1..111: note = Description of Artificial Sequence: Synthetic polynucleotide
  source 1..111: mol_type = other DNA

SEQ ID NO: 1741 - protein, 37 aa, synthetic construct; identical to SEQ ID NO: 157
  REGION 1..37: note = Description of Artificial Sequence: Synthetic polypeptide

SEQ ID NO: 1742-1743 - skipped (2 entries)

SEQ ID NO: 1744 - DNA, 336 bp, synthetic construct; identical to SEQ ID NO: 426
  misc_feature 1..336: note = Description of Artificial Sequence: Synthetic polynucleotide
  source 1..336: mol_type = other DNA

SEQ ID NO: 1745 - protein, 112 aa, synthetic construct; identical to SEQ ID NO: 161
  REGION 1..112: note = Description of Artificial Sequence: Synthetic polypeptide

SEQ ID NO: 1746 - skipped

SEQ ID NO: 1747 - DNA, 267 bp, synthetic construct; identical to SEQ ID NO: 932
  misc_feature 1..267: note = Description of Artificial Sequence: Synthetic polynucleotide
  source 1..267: mol_type = other DNA

SEQ ID NO: 1748 - protein, 89 aa, synthetic construct; identical to SEQ ID NO: 933
  REGION 1..89: note = Description of Artificial Sequence: Synthetic polypeptide

SEQ ID NO: 1749 - DNA, 18 bp, synthetic construct
  misc_feature 1..18: note = Description of Artificial Sequence: Synthetic oligonucleotide
  source 1..18: mol_type = other DNA
tcaggcggtggctcaggt

SEQ ID NO: 1750 - protein, 6 aa, synthetic construct
  REGION 1..6: note = Description of Artificial Sequence: Synthetic peptide
SGGGSG

SEQ ID NO: 1751 - DNA, 318 bp, synthetic construct
  misc_feature 1..318: note = Description of Artificial Sequence: Synthetic polynucleotide
  source 1..318: mol_type = other DNA
ggcgtccaagtcgaaaccattagtcccggcgatggcagaacatttcctaaaaggggacaaacatgtgtcgtccattatacaggcatgttggaggacggcaaaaaggtcgacagtagtagagatcgcaataaacctttcaaattcatgttgggaaaacaagaagtcattaggggatgggaggagggcgtggctcaaatgtccgtcggccaacgcgctaagctcaccatcagccccgactacgcatacggcgctaccggacatcccggaattattccccctcacgctaccttggtgtttgacgtcgaactgttgaagctc

SEQ ID NO: 1752 - protein, 106 aa, synthetic construct; identical to SEQ ID NO: 520
  REGION 1..106: note = Description of Artificial Sequence: Synthetic polypeptide

SEQ ID NO: 1753 - DNA, 17 bp, synthetic construct
  misc_feature 1..17: note = Description of Artificial Sequence: Synthetic oligonucleotide
  source 1..17: mol_type = other DNA
tcggggggcggatcagg

SEQ ID NO: 1754 - protein, 5 aa, synthetic construct
  REGION 1..5: note = Description of Artificial Sequence: Synthetic peptide
SGGGS

SEQ ID NO: 1755 - DNA, 864 bp, synthetic construct; identical to SEQ ID NO: 44
  misc_feature 1..864: note = Description of Artificial Sequence: Synthetic polynucleotide
  source 1..864: mol_type = other DNA

SEQ ID NO: 1756 - protein, 288 aa, synthetic construct; identical to SEQ ID NO: 45
  REGION 1..288: note = Description of Artificial Sequence: Synthetic polypeptide

SEQ ID NO: 1757-1758 - skipped (2 entries)

SEQ ID NO: 1759 - DNA, 54 bp, synthetic construct; identical to SEQ ID NO: 138
  misc_feature 1..54: note = Description of Artificial Sequence: Synthetic oligonucleotide
  source 1..54: mol_type = other DNA

SEQ ID NO: 1760 - protein, 18 aa, synthetic construct
  REGION 1..18: note = Description of Artificial Sequence: Synthetic peptide
EGRGSLLTCGDVEENPGP

SEQ ID NO: 1761 - DNA, 999 bp, synthetic construct; identical to SEQ ID NO: 1056
  misc_feature 1..999: note = Description of Artificial Sequence: Synthetic polynucleotide
  source 1..999: mol_type = other DNA

SEQ ID NO: 1762 - protein, 333 aa, synthetic construct; identical to SEQ ID NO: 15
  REGION 1..333: note = Description of Artificial Sequence: Synthetic polypeptide

SEQ ID NO: 1763 - skipped

SEQ ID NO: 1764 - DNA, 318 bp, synthetic construct; identical to SEQ ID NO: 1751
  misc_feature 1..318: note = Description of Artificial Sequence: Synthetic polynucleotide
  source 1..318: mol_type = other DNA

SEQ ID NO: 1765 - protein, 106 aa, synthetic construct; identical to SEQ ID NO: 520
  REGION 1..106: note = Description of Artificial Sequence: Synthetic polypeptide

SEQ ID NO: 1766 - DNA, 17 bp, synthetic construct
  misc_feature 1..17: note = Description of Artificial Sequence: Synthetic oligonucleotide
  source 1..17: mol_type = other DNA
tcggggggcggatcagg

SEQ ID NO: 1767 - protein, 5 aa, synthetic construct
  REGION 1..5: note = Description of Artificial Sequence: Synthetic peptide
SGGGS

SEQ ID NO: 1768 - DNA, 267 bp, synthetic construct; identical to SEQ ID NO: 932
  misc_feature 1..267: note = Description of Artificial Sequence: Synthetic polynucleotide
  source 1..267: mol_type = other DNA

SEQ ID NO: 1769 - protein, 89 aa, synthetic construct; identical to SEQ ID NO: 933
  REGION 1..89: note = Description of Artificial Sequence: Synthetic polypeptide

SEQ ID NO: 1770 - DNA, 18 bp, synthetic construct
  misc_feature 1..18: note = Description of Artificial Sequence: Synthetic oligonucleotide
  source 1..18: mol_type = other DNA
tcaggcggtggctcaggt

SEQ ID NO: 1771 - protein, 6 aa, synthetic construct
  REGION 1..6: note = Description of Artificial Sequence: Synthetic peptide
SGGGSG

SEQ ID NO: 1772 - DNA, 864 bp, synthetic construct; identical to SEQ ID NO: 44
  misc_feature 1..864: note = Description of Artificial Sequence: Synthetic polynucleotide
  source 1..864: mol_type = other DNA

SEQ ID NO: 1773 - protein, 288 aa, synthetic construct; identical to SEQ ID NO: 45
  REGION 1..288: note = Description of Artificial Sequence: Synthetic polypeptide

SEQ ID NO: 1774-1775 - skipped (2 entries)

SEQ ID NO: 1776 - DNA, 54 bp, synthetic construct; identical to SEQ ID NO: 138
  misc_feature 1..54: note = Description of Artificial Sequence: Synthetic oligonucleotide
  source 1..54: mol_type = other DNA

SEQ ID NO: 1777 - protein, 18 aa, synthetic construct
  REGION 1..18: note = Description of Artificial Sequence: Synthetic peptide
EGRGSLLTCGDVEENPGP

SEQ ID NO: 1778 - DNA, 999 bp, synthetic construct; identical to SEQ ID NO: 1056
  misc_feature 1..999: note = Description of Artificial Sequence: Synthetic polynucleotide
  source 1..999: mol_type = other DNA

SEQ ID NO: 1779 - protein, 333 aa, synthetic construct; identical to SEQ ID NO: 15
  REGION 1..333: note = Description of Artificial Sequence: Synthetic polypeptide

SEQ ID NO: 1780 - skipped

SEQ ID NO: 1781 - DNA, 163 bp, synthetic construct
  misc_feature 1..163: note = Description of Artificial Sequence: Synthetic polynucleotide
  source 1..163: mol_type = other DNA
agcgcagaggcttggggcagccgagcggcagccaggccccggcccgggcctcggttccagaagggagaggagcccgccaaggcgcgcaagagagcgggctgcctcgcagtccgagccggagagggagcgcgagccgcgccggccccggacggcctccgaaacc

SEQ ID NO: 1782 - protein, 54 aa, synthetic construct
  REGION 1..54: note = Description of Artificial Sequence: Synthetic polypeptide
AQRLGAAERQPGPGPGLGSRRERSPPRRARERAASQSEPEREREPRRPRTASET

SEQ ID NO: 1783 - DNA, 321 bp, synthetic construct; identical to SEQ ID NO: 928
  misc_feature 1..321: note = Description of Artificial Sequence: Synthetic polynucleotide
  source 1..321: mol_type = other DNA

SEQ ID NO: 1784 - protein, 107 aa, synthetic construct; identical to SEQ ID NO: 929
  REGION 1..107: note = Description of Artificial Sequence: Synthetic polypeptide

SEQ ID NO: 1785 - DNA, 12 bp, synthetic construct
  misc_feature 1..12: note = Description of Artificial Sequence: Synthetic oligonucleotide
  source 1..12: mol_type = other DNA
ggcgggcaattg

SEQ ID NO: 1786 - protein, 4 aa, synthetic construct
  REGION 1..4: note = Description of Artificial Sequence: Synthetic peptide
GGQL

SEQ ID NO: 1787 - DNA, 267 bp, synthetic construct; identical to SEQ ID NO: 932
  misc_feature 1..267: note = Description of Artificial Sequence: Synthetic polynucleotide
  source 1..267: mol_type = other DNA

SEQ ID NO: 1788 - protein, 89 aa, synthetic construct; identical to SEQ ID NO: 933
  REGION 1..89: note = Description of Artificial Sequence: Synthetic polypeptide

SEQ ID NO: 1789 - DNA, 24 bp, synthetic construct
  misc_feature 1..24: note = Description of Artificial Sequence: Synthetic oligonucleotide
  source 1..24: mol_type = other DNA
tcaggcggtggctcaggtccatgg

SEQ ID NO: 1790 - protein, 8 aa, synthetic construct
  REGION 1..8: note = Description of Artificial Sequence: Synthetic peptide
SGGGSGPW

SEQ ID NO: 1791 - DNA, 858 bp, synthetic construct; identical to SEQ ID NO: 936
  misc_feature 1..858: note = Description of Artificial Sequence: Synthetic polynucleotide
  source 1..858: mol_type = other DNA

SEQ ID NO: 1792 - protein, 286 aa, synthetic construct; identical to SEQ ID NO: 937
  REGION 1..286: note = Description of Artificial Sequence: Synthetic polypeptide

SEQ ID NO: 1793 - DNA, 15 bp, synthetic construct
  misc_feature 1..15: note = Description of Artificial Sequence: Synthetic oligonucleotide
  source 1..15: mol_type = other DNA
ggatctggaccgcgg

SEQ ID NO: 1794 - protein, 5 aa, synthetic construct
  REGION 1..5: note = Description of Artificial Sequence: Synthetic peptide
GSGPR

SEQ ID NO: 1795 - DNA, 54 bp, synthetic construct; identical to SEQ ID NO: 138
  misc_feature 1..54: note = Description of Artificial Sequence: Synthetic oligonucleotide
  source 1..54: mol_type = other DNA

SEQ ID NO: 1796 - protein, 18 aa, synthetic construct
  REGION 1..18: note = Description of Artificial Sequence: Synthetic peptide
EGRGSLLTCGDVEENPGP

SEQ ID NO: 1797-1798 - skipped (2 entries)

SEQ ID NO: 1799 - DNA, 63 bp, synthetic construct; identical to SEQ ID NO: 142
  misc_feature 1..63: note = Description of Artificial Sequence: Synthetic oligonucleotide
  source 1..63: mol_type = other DNA

SEQ ID NO: 1800 - protein, 21 aa, synthetic construct
  REGION 1..21: note = Description of Artificial Sequence: Synthetic peptide
MEFGLSWLFLVAILKGVQCSR

SEQ ID NO: 1801 - DNA, 318 bp, synthetic construct; identical to SEQ ID NO: 1003
  misc_feature 1..318: note = Description of Artificial Sequence: Synthetic polynucleotide
  source 1..318: mol_type = other DNA

SEQ ID NO: 1802 - protein, 106 aa, synthetic construct; identical to SEQ ID NO: 1004
  REGION 1..106: note = Description of Artificial Sequence: Synthetic polypeptide

SEQ ID NO: 1803 - DNA, 24 bp, synthetic construct
  misc_feature 1..24: note = Description of Artificial Sequence: Synthetic oligonucleotide
  source 1..24: mol_type = other DNA
ggcggaggaagcggaggtgggggc

SEQ ID NO: 1804 - protein, 8 aa, synthetic construct
  REGION 1..8: note = Description of Artificial Sequence: Synthetic peptide
GGGSGGGG

SEQ ID NO: 1805 - DNA, 336 bp, synthetic construct; identical to SEQ ID NO: 1007
  misc_feature 1..336: note = Description of Artificial Sequence: Synthetic polynucleotide
  source 1..336: mol_type = other DNA

SEQ ID NO: 1806 - protein, 112 aa, synthetic construct; identical to SEQ ID NO: 1008
  REGION 1..112: note = Description of Artificial Sequence: Synthetic polypeptide

SEQ ID NO: 1807-1808 - skipped (2 entries)

SEQ ID NO: 1809 - DNA, 48 bp, synthetic construct; identical to SEQ ID NO: 152
  misc_feature 1..48: note = Description of Artificial Sequence: Synthetic oligonucleotide
  source 1..48: mol_type = other DNA

SEQ ID NO: 1810 - protein, 16 aa, synthetic construct
  REGION 1..16: note = Description of Artificial Sequence: Synthetic peptide
ELPTQGTFSNVSTNVS

SEQ ID NO: 1811 - DNA, 126 bp, synthetic construct; identical to SEQ ID NO: 154
  misc_feature 1..126: note = Description of Artificial Sequence: Synthetic polynucleotide
  source 1..126: mol_type = other DNA

SEQ ID NO: 1812 - protein, 42 aa, synthetic construct; identical to SEQ ID NO: 155
  REGION 1..42: note = Description of Artificial Sequence: Synthetic polypeptide

SEQ ID NO: 1813 - DNA, 111 bp, synthetic construct; identical to SEQ ID NO: 156
  misc_feature 1..111: note = Description of Artificial Sequence: Synthetic polynucleotide
  source 1..111: mol_type = other DNA

SEQ ID NO: 1814 - protein, 37 aa, synthetic construct; identical to SEQ ID NO: 157
  REGION 1..37: note = Description of Artificial Sequence: Synthetic polypeptide

SEQ ID NO: 1815-1816 - skipped (2 entries)

SEQ ID NO: 1817 - DNA, 336 bp, synthetic construct; identical to SEQ ID NO: 426
  misc_feature 1..336: note = Description of Artificial Sequence: Synthetic polynucleotide
  source 1..336: mol_type = other DNA

SEQ ID NO: 1818 - protein, 112 aa, synthetic construct; identical to SEQ ID NO: 161
  REGION 1..112: note = Description of Artificial Sequence: Synthetic polypeptide

SEQ ID NO: 1819 - DNA, 18 bp, synthetic construct
  misc_feature 1..18: note = Description of Artificial Sequence: Synthetic oligonucleotide
  source 1..18: mol_type = other DNA
ggaacgcgtggatcggga

SEQ ID NO: 1820 - protein, 6 aa, synthetic construct
  REGION 1..6: note = Description of Artificial Sequence: Synthetic peptide
GTRGSG

SEQ ID NO: 1821 - DNA, 57 bp, synthetic construct; identical to SEQ ID NO: 737
  misc_feature 1..57: note = Description of Artificial Sequence: Synthetic oligonucleotide
  source 1..57: mol_type = other DNA

SEQ ID NO: 1822 - protein, 19 aa, synthetic construct
  REGION 1..19: note = Description of Artificial Sequence: Synthetic peptide
ATNFSLLKQAGDVEENPGP

SEQ ID NO: 1823 - DNA, 516 bp, synthetic construct; identical to SEQ ID NO: 251
  misc_feature 1..516: note = Description of Artificial Sequence: Synthetic polynucleotide
  source 1..516: mol_type = other DNA

SEQ ID NO: 1824 - protein, 172 aa, synthetic construct; identical to SEQ ID NO: 240
  REGION 1..172: note = Description of Artificial Sequence: Synthetic polypeptide

SEQ ID NO: 1825-1826 - skipped (2 entries)

SEQ ID NO: 1827 - DNA, 186 bp, synthetic construct; identical to SEQ ID NO: 255
  misc_feature 1..186: note = Description of Artificial Sequence: Synthetic polynucleotide
  source 1..186: mol_type = other DNA

SEQ ID NO: 1828 - protein, 62 aa, synthetic construct; identical to SEQ ID NO: 216
  REGION 1..62: note = Description of Artificial Sequence: Synthetic polypeptide

SEQ ID NO: 1829-1830 - skipped (2 entries)

SEQ ID NO: 1831 - DNA, 321 bp, synthetic construct; identical to SEQ ID NO: 757
  misc_feature 1..321: note = Description of Artificial Sequence: Synthetic polynucleotide
  source 1..321: mol_type = other DNA

SEQ ID NO: 1832 - protein, 107 aa, synthetic construct; identical to SEQ ID NO: 3
  REGION 1..107: note = Description of Artificial Sequence: Synthetic polypeptide

SEQ ID NO: 1833-1834 - skipped (2 entries)

SEQ ID NO: 1835 - DNA, 321 bp, synthetic construct; identical to SEQ ID NO: 761
  misc_feature 1..321: note = Description of Artificial Sequence: Synthetic polynucleotide
  source 1..321: mol_type = other DNA

SEQ ID NO: 1836 - protein, 107 aa, synthetic construct; identical to SEQ ID NO: 3
  REGION 1..107: note = Description of Artificial Sequence: Synthetic polypeptide

SEQ ID NO: 1837 - skipped

SEQ ID NO: 1838 - DNA, 163 bp, synthetic construct; identical to SEQ ID NO: 1781
  misc_feature 1..163: note = Description of Artificial Sequence: Synthetic polynucleotide
  source 1..163: mol_type = other DNA

SEQ ID NO: 1839 - protein, 54 aa, synthetic construct; identical to SEQ ID NO: 1782
  REGION 1..54: note = Description of Artificial Sequence: Synthetic polypeptide

SEQ ID NO: 1840 - DNA, 321 bp, synthetic construct; identical to SEQ ID NO: 928
  misc_feature 1..321: note = Description of Artificial Sequence: Synthetic polynucleotide
  source 1..321: mol_type = other DNA

SEQ ID NO: 1841 - protein, 107 aa, synthetic construct; identical to SEQ ID NO: 929
  REGION 1..107: note = Description of Artificial Sequence: Synthetic polypeptide

SEQ ID NO: 1842 - DNA, 12 bp, synthetic construct
  misc_feature 1..12: note = Description of Artificial Sequence: Synthetic oligonucleotide
  source 1..12: mol_type = other DNA
ggcgggcaattg

SEQ ID NO: 1843 - protein, 4 aa, synthetic construct
  REGION 1..4: note = Description of Artificial Sequence: Synthetic peptide
GGQL

SEQ ID NO: 1844 - DNA, 267 bp, synthetic construct; identical to SEQ ID NO: 932
  misc_feature 1..267: note = Description of Artificial Sequence: Synthetic polynucleotide
  source 1..267: mol_type = other DNA

SEQ ID NO: 1845 - protein, 89 aa, synthetic construct; identical to SEQ ID NO: 933
  REGION 1..89: note = Description of Artificial Sequence: Synthetic polypeptide

SEQ ID NO: 1846 - DNA, 24 bp, synthetic construct
  misc_feature 1..24: note = Description of Artificial Sequence: Synthetic oligonucleotide
  source 1..24: mol_type = other DNA
tcaggcggtggctcaggtccatgg

SEQ ID NO: 1847 - protein, 8 aa, synthetic construct
  REGION 1..8: note = Description of Artificial Sequence: Synthetic peptide
SGGGSGPW

SEQ ID NO: 1848 - DNA, 858 bp, synthetic construct; identical to SEQ ID NO: 936
  misc_feature 1..858: note = Description of Artificial Sequence: Synthetic polynucleotide
  source 1..858: mol_type = other DNA

SEQ ID NO: 1849 - protein, 286 aa, synthetic construct; identical to SEQ ID NO: 937
  REGION 1..286: note = Description of Artificial Sequence: Synthetic polypeptide

SEQ ID NO: 1850 - DNA, 15 bp, synthetic construct
  misc_feature 1..15: note = Description of Artificial Sequence: Synthetic oligonucleotide
  source 1..15: mol_type = other DNA
ggatctggaccgcgg

SEQ ID NO: 1851 - protein, 5 aa, synthetic construct
  REGION 1..5: note = Description of Artificial Sequence: Synthetic peptide
GSGPR

SEQ ID NO: 1852 - DNA, 54 bp, synthetic construct; identical to SEQ ID NO: 138
  misc_feature 1..54: note = Description of Artificial Sequence: Synthetic oligonucleotide
  source 1..54: mol_type = other DNA

SEQ ID NO: 1853 - protein, 18 aa, synthetic construct
  REGION 1..18: note = Description of Artificial Sequence: Synthetic peptide
EGRGSLLTCGDVEENPGP

SEQ ID NO: 1854-1855 - skipped (2 entries)

SEQ ID NO: 1856 - DNA, 63 bp, synthetic construct; identical to SEQ ID NO: 142
  misc_feature 1..63: note = Description of Artificial Sequence: Synthetic oligonucleotide
  source 1..63: mol_type = other DNA

SEQ ID NO: 1857 - protein, 21 aa, synthetic construct
  REGION 1..21: note = Description of Artificial Sequence: Synthetic peptide
MEFGLSWLFLVAILKGVQCSR

SEQ ID NO: 1858 - DNA, 318 bp, synthetic construct; identical to SEQ ID NO: 1003
  misc_feature 1..318: note = Description of Artificial Sequence: Synthetic polynucleotide
  source 1..318: mol_type = other DNA

SEQ ID NO: 1859 - protein, 106 aa, synthetic construct; identical to SEQ ID NO: 1004
  REGION 1..106: note = Description of Artificial Sequence: Synthetic polypeptide

SEQ ID NO: 1860 - DNA, 24 bp, synthetic construct
  misc_feature 1..24: note = Description of Artificial Sequence: Synthetic oligonucleotide
  source 1..24: mol_type = other DNA
ggcggaggaagcggaggtgggggc

SEQ ID NO: 1861 - protein, 8 aa, synthetic construct
  REGION 1..8: note = Description of Artificial Sequence: Synthetic peptide
GGGSGGGG

SEQ ID NO: 1862 - DNA, 336 bp, synthetic construct; identical to SEQ ID NO: 1007
  misc_feature 1..336: note = Description of Artificial Sequence: Synthetic polynucleotide
  source 1..336: mol_type = other DNA

SEQ ID NO: 1863 - protein, 112 aa, synthetic construct; identical to SEQ ID NO: 1008
  REGION 1..112: note = Description of Artificial Sequence: Synthetic polypeptide

SEQ ID NO: 1864-1865 - skipped (2 entries)

SEQ ID NO: 1866 - DNA, 48 bp, synthetic construct; identical to SEQ ID NO: 152
  misc_feature 1..48: note = Description of Artificial Sequence: Synthetic oligonucleotide
  source 1..48: mol_type = other DNA

SEQ ID NO: 1867 - protein, 16 aa, synthetic construct
  REGION 1..16: note = Description of Artificial Sequence: Synthetic peptide
ELPTQGTFSNVSTNVS

SEQ ID NO: 1868 - DNA, 126 bp, synthetic construct; identical to SEQ ID NO: 154
  misc_feature 1..126: note = Description of Artificial Sequence: Synthetic polynucleotide
  source 1..126: mol_type = other DNA

SEQ ID NO: 1869 - protein, 42 aa, synthetic construct; identical to SEQ ID NO: 155
  REGION 1..42: note = Description of Artificial Sequence: Synthetic polypeptide

SEQ ID NO: 1870 - DNA, 111 bp, synthetic construct; identical to SEQ ID NO: 156
  misc_feature 1..111: note = Description of Artificial Sequence: Synthetic polynucleotide
  source 1..111: mol_type = other DNA

SEQ ID NO: 1871 - protein, 37 aa, synthetic construct; identical to SEQ ID NO: 157
  REGION 1..37: note = Description of Artificial Sequence: Synthetic polypeptide

SEQ ID NO: 1872-1873 - skipped (2 entries)

SEQ ID NO: 1874 - DNA, 335 bp, synthetic construct; identical to SEQ ID NO: 725
  misc_feature 1..335: note = Description of Artificial Sequence: Synthetic polynucleotide
  source 1..335: mol_type = other DNA

SEQ ID NO: 1875 - protein, 112 aa, synthetic construct; identical to SEQ ID NO: 161
  REGION 1..112: note = Description of Artificial Sequence: Synthetic polypeptide

SEQ ID NO: 1876 - skipped

SEQ ID NO: 1877 - DNA, 267 bp, synthetic construct; identical to SEQ ID NO: 932
  misc_feature 1..267: note = Description of Artificial Sequence: Synthetic polynucleotide
  source 1..267: mol_type = other DNA

SEQ ID NO: 1878 - protein, 89 aa, synthetic construct; identical to SEQ ID NO: 933
  REGION 1..89: note = Description of Artificial Sequence: Synthetic polypeptide

SEQ ID NO: 1879 - DNA, 12 bp, synthetic construct
  misc_feature 1..12: note = Description of Artificial Sequence: Synthetic oligonucleotide
  source 1..12: mol_type = other DNA
ggcgggcaattg

SEQ ID NO: 1880 - protein, 4 aa, synthetic construct
  REGION 1..4: note = Description of Artificial Sequence: Synthetic peptide
GGQL

SEQ ID NO: 1881 - DNA, 321 bp, synthetic construct; identical to SEQ ID NO: 928
  misc_feature 1..321: note = Description of Artificial Sequence: Synthetic polynucleotide
  source 1..321: mol_type = other DNA

SEQ ID NO: 1882 - protein, 107 aa, synthetic construct; identical to SEQ ID NO: 929
  REGION 1..107: note = Description of Artificial Sequence: Synthetic polypeptide

SEQ ID NO: 1883 - DNA, 24 bp, synthetic construct
  misc_feature 1..24: note = Description of Artificial Sequence: Synthetic oligonucleotide
  source 1..24: mol_type = other DNA
tcaggcggtggctcaggtccatgg

SEQ ID NO: 1884 - protein, 8 aa, synthetic construct
  REGION 1..8: note = Description of Artificial Sequence: Synthetic peptide
SGGGSGPW

SEQ ID NO: 1885 - DNA, 858 bp, synthetic construct; identical to SEQ ID NO: 936
  misc_feature 1..858: note = Description of Artificial Sequence: Synthetic polynucleotide
  source 1..858: mol_type = other DNA

SEQ ID NO: 1886 - protein, 286 aa, synthetic construct; identical to SEQ ID NO: 937
  REGION 1..286: note = Description of Artificial Sequence: Synthetic polypeptide

SEQ ID NO: 1887 - DNA, 15 bp, synthetic construct
  misc_feature 1..15: note = Description of Artificial Sequence: Synthetic oligonucleotide
  source 1..15: mol_type = other DNA
ggatctggaccgcgg

SEQ ID NO: 1888 - protein, 5 aa, synthetic construct
  REGION 1..5: note = Description of Artificial Sequence: Synthetic peptide
GSGPR

SEQ ID NO: 1889 - DNA, 54 bp, synthetic construct; identical to SEQ ID NO: 138
  misc_feature 1..54: note = Description of Artificial Sequence: Synthetic oligonucleotide
  source 1..54: mol_type = other DNA

SEQ ID NO: 1890 - protein, 18 aa, synthetic construct
  REGION 1..18: note = Description of Artificial Sequence: Synthetic peptide
EGRGSLLTCGDVEENPGP

SEQ ID NO: 1891 - DNA, 999 bp, synthetic construct; identical to SEQ ID NO: 1056
  misc_feature 1..999: note = Description of Artificial Sequence: Synthetic polynucleotide
  source 1..999: mol_type = other DNA

SEQ ID NO: 1892 - protein, 333 aa, synthetic construct; identical to SEQ ID NO: 15
  REGION 1..333: note = Description of Artificial Sequence: Synthetic polypeptide

SEQ ID NO: 1893 - skipped

SEQ ID NO: 1894 - DNA, 516 bp, synthetic construct; identical to SEQ ID NO: 251
  misc_feature 1..516: note = Description of Artificial Sequence: Synthetic polynucleotide
  source 1..516: mol_type = other DNA

SEQ ID NO: 1895 - protein, 172 aa, synthetic construct; identical to SEQ ID NO: 240
  REGION 1..172: note = Description of Artificial Sequence: Synthetic polypeptide

SEQ ID NO: 1896-1897 - skipped (2 entries)

SEQ ID NO: 1898 - DNA, 186 bp, synthetic construct; identical to SEQ ID NO: 255
  misc_feature 1..186: note = Description of Artificial Sequence: Synthetic polynucleotide
  source 1..186: mol_type = other DNA

SEQ ID NO: 1899 - protein, 62 aa, synthetic construct; identical to SEQ ID NO: 216
  REGION 1..62: note = Description of Artificial Sequence: Synthetic polypeptide

SEQ ID NO: 1900-1901 - skipped (2 entries)

SEQ ID NO: 1902 - DNA, 321 bp, synthetic construct; identical to SEQ ID NO: 1553
  misc_feature 1..321: note = Description of Artificial Sequence: Synthetic polynucleotide
  source 1..321: mol_type = other DNA

SEQ ID NO: 1903 - protein, 107 aa, synthetic construct; identical to SEQ ID NO: 929
  REGION 1..107: note = Description of Artificial Sequence: Synthetic polypeptide

SEQ ID NO: 1904-1905 - skipped (2 entries)

SEQ ID NO: 1906 - DNA, 273 bp, synthetic construct; identical to SEQ ID NO: 1557
  misc_feature 1..273: note = Description of Artificial Sequence: Synthetic polynucleotide
  source 1..273: mol_type = other DNA

SEQ ID NO: 1907 - protein, 91 aa, synthetic construct; identical to SEQ ID NO: 1558
  REGION 1..91: note = Description of Artificial Sequence: Synthetic polypeptide

SEQ ID NO: 1908-1909 - skipped (2 entries)

SEQ ID NO: 1910 - DNA, 54 bp, synthetic construct; identical to SEQ ID NO: 138
  misc_feature 1..54: note = Description of Artificial Sequence: Synthetic oligonucleotide
  source 1..54: mol_type = other DNA

SEQ ID NO: 1911 - protein, 18 aa, synthetic construct
  REGION 1..18: note = Description of Artificial Sequence: Synthetic peptide
EGRGSLLTCGDVEENPGP

SEQ ID NO: 1912-1913 - skipped (2 entries)

SEQ ID NO: 1914 - DNA, 63 bp, synthetic construct; identical to SEQ ID NO: 142
  misc_feature 1..63: note = Description of Artificial Sequence: Synthetic oligonucleotide
  source 1..63: mol_type = other DNA

SEQ ID NO: 1915 - protein, 21 aa, synthetic construct
  REGION 1..21: note = Description of Artificial Sequence: Synthetic peptide
MEFGLSWLFLVAILKGVQCSR

SEQ ID NO: 1916 - DNA, 318 bp, synthetic construct; identical to SEQ ID NO: 1003
  misc_feature 1..318: note = Description of Artificial Sequence: Synthetic polynucleotide
  source 1..318: mol_type = other DNA

SEQ ID NO: 1917 - protein, 106 aa, synthetic construct; identical to SEQ ID NO: 1004
  REGION 1..106: note = Description of Artificial Sequence: Synthetic polypeptide

SEQ ID NO: 1918 - DNA, 24 bp, synthetic construct
  misc_feature 1..24: note = Description of Artificial Sequence: Synthetic oligonucleotide
  source 1..24: mol_type = other DNA
ggcggaggaagcggaggtgggggc

SEQ ID NO: 1919 - protein, 8 aa, synthetic construct
  REGION 1..8: note = Description of Artificial Sequence: Synthetic peptide
GGGSGGGG

SEQ ID NO: 1920 - DNA, 336 bp, synthetic construct; identical to SEQ ID NO: 1007
  misc_feature 1..336: note = Description of Artificial Sequence: Synthetic polynucleotide
  source 1..336: mol_type = other DNA

SEQ ID NO: 1921 - protein, 112 aa, synthetic construct; identical to SEQ ID NO: 1008
  REGION 1..112: note = Description of Artificial Sequence: Synthetic polypeptide

SEQ ID NO: 1922-1923 - skipped (2 entries)

SEQ ID NO: 1924 - DNA, 48 bp, synthetic construct; identical to SEQ ID NO: 152
  misc_feature 1..48: note = Description of Artificial Sequence: Synthetic oligonucleotide
  source 1..48: mol_type = other DNA

SEQ ID NO: 1925 - protein, 16 aa, synthetic construct
  REGION 1..16: note = Description of Artificial Sequence: Synthetic peptide
ELPTQGTFSNVSTNVS

SEQ ID NO: 1926 - DNA, 126 bp, synthetic construct; identical to SEQ ID NO: 154
  misc_feature 1..126: note = Description of Artificial Sequence: Synthetic polynucleotide
  source 1..126: mol_type = other DNA

SEQ ID NO: 1927 - protein, 42 aa, synthetic construct; identical to SEQ ID NO: 155
  REGION 1..42: note = Description of Artificial Sequence: Synthetic polypeptide

SEQ ID NO: 1928 - DNA, 111 bp, synthetic construct; identical to SEQ ID NO: 156
  misc_feature 1..111: note = Description of Artificial Sequence: Synthetic polynucleotide
  source 1..111: mol_type = other DNA

SEQ ID NO: 1929 - protein, 37 aa, synthetic construct; identical to SEQ ID NO: 157
  REGION 1..37: note = Description of Artificial Sequence: Synthetic polypeptide

SEQ ID NO: 1930-1931 - skipped (2 entries)

SEQ ID NO: 1932 - DNA, 336 bp, synthetic construct; identical to SEQ ID NO: 426
  misc_feature 1..336: note = Description of Artificial Sequence: Synthetic polynucleotide
  source 1..336: mol_type = other DNA

SEQ ID NO: 1933 - protein, 112 aa, synthetic construct; identical to SEQ ID NO: 161
  REGION 1..112: note = Description of Artificial Sequence: Synthetic polypeptide

SEQ ID NO: 1934 - DNA, 18 bp, synthetic construct
  misc_feature 1..18: note = Description of Artificial Sequence: Synthetic oligonucleotide
  source 1..18: mol_type = other DNA
atgctcgagcaattggag

SEQ ID NO: 1935 - protein, 6 aa, synthetic construct
  REGION 1..6: note = Description of Artificial Sequence: Synthetic peptide
MLEQLE

SEQ ID NO: 1936 - DNA, 321 bp, synthetic construct; identical to SEQ ID NO: 317
  misc_feature 1..321: note = Description of Artificial Sequence: Synthetic polynucleotide
  source 1..321: mol_type = other DNA

SEQ ID NO: 1937 - protein, 107 aa, synthetic construct; identical to SEQ ID NO: 3
  REGION 1..107: note = Description of Artificial Sequence: Synthetic polypeptide

SEQ ID NO: 1938 - DNA, 24 bp, synthetic construct
  misc_feature 1..24: note = Description of Artificial Sequence: Synthetic oligonucleotide
  source 1..24: mol_type = other DNA
tcaggcggtggctcaggtgtggac

SEQ ID NO: 1939 - protein, 8 aa, synthetic construct
  REGION 1..8: note = Description of Artificial Sequence: Synthetic peptide
SGGGSGVD

SEQ ID NO: 1940 - DNA, 858 bp, synthetic construct; identical to SEQ ID NO: 936
  misc_feature 1..858: note = Description of Artificial Sequence: Synthetic polynucleotide
  source 1..858: mol_type = other DNA

SEQ ID NO: 1941 - protein, 286 aa, synthetic construct; identical to SEQ ID NO: 937
  REGION 1..286: note = Description of Artificial Sequence: Synthetic polypeptide

SEQ ID NO: 1942 - DNA, 15 bp, synthetic construct
  misc_feature 1..15: note = Description of Artificial Sequence: Synthetic oligonucleotide
  source 1..15: mol_type = other DNA
ggatctggaccgcgg

SEQ ID NO: 1943 - protein, 5 aa, synthetic construct
  REGION 1..5: note = Description of Artificial Sequence: Synthetic peptide
GSGPR

SEQ ID NO: 1944 - DNA, 54 bp, synthetic construct; identical to SEQ ID NO: 138
  misc_feature 1..54: note = Description of Artificial Sequence: Synthetic oligonucleotide
  source 1..54: mol_type = other DNA

SEQ ID NO: 1945 - protein, 18 aa, synthetic construct
  REGION 1..18: note = Description of Artificial Sequence: Synthetic peptide
EGRGSLLTCGDVEENPGP

SEQ ID NO: 1946-1947 - skipped (2 entries)

SEQ ID NO: 1948 - DNA, 63 bp, synthetic construct; identical to SEQ ID NO: 142
  misc_feature 1..63: note = Description of Artificial Sequence: Synthetic oligonucleotide
  source 1..63: mol_type = other DNA

SEQ ID NO: 1949 - protein, 21 aa, synthetic construct
  REGION 1..21: note = Description of Artificial Sequence: Synthetic peptide
MEFGLSWLFLVAILKGVQCSR

SEQ ID NO: 1950 - DNA, 318 bp, synthetic construct; identical to SEQ ID NO: 1003
  misc_feature 1..318: note = Description of Artificial Sequence: Synthetic polynucleotide
  source 1..318: mol_type = other DNA

SEQ ID NO: 1951 - protein, 106 aa, synthetic construct; identical to SEQ ID NO: 1004
  REGION 1..106: note = Description of Artificial Sequence: Synthetic polypeptide

SEQ ID NO: 1952 - DNA, 24 bp, synthetic construct
  misc_feature 1..24: note = Description of Artificial Sequence: Synthetic oligonucleotide
  source 1..24: mol_type = other DNA
ggcggaggaagcggaggtgggggc

SEQ ID NO: 1953 - protein, 8 aa, synthetic construct
  REGION 1..8: note = Description of Artificial Sequence: Synthetic peptide
GGGSGGGG

SEQ ID NO: 1954 - DNA, 336 bp, synthetic construct; identical to SEQ ID NO: 1007
  misc_feature 1..336: note = Description of Artificial Sequence: Synthetic polynucleotide
  source 1..336: mol_type = other DNA

SEQ ID NO: 1955 - protein, 112 aa, synthetic construct; identical to SEQ ID NO: 1008
  REGION 1..112: note = Description of Artificial Sequence: Synthetic polypeptide

SEQ ID NO: 1956-1957 - skipped (2 entries)

SEQ ID NO: 1958 - DNA, 48 bp, synthetic construct; identical to SEQ ID NO: 152
  misc_feature 1..48: note = Description of Artificial Sequence: Synthetic oligonucleotide
  source 1..48: mol_type = other DNA

SEQ ID NO: 1959 - protein, 16 aa, synthetic construct
  REGION 1..16: note = Description of Artificial Sequence: Synthetic peptide
ELPTQGTFSNVSTNVS

SEQ ID NO: 1960 - DNA, 336 bp, synthetic construct; identical to SEQ ID NO: 426
  misc_feature 1..336: note = Description of Artificial Sequence: Synthetic polynucleotide
  source 1..336: mol_type = other DNA

SEQ ID NO: 1961 - protein, 112 aa, synthetic construct; identical to SEQ ID NO: 161
  REGION 1..112: note = Description of Artificial Sequence: Synthetic polypeptide

SEQ ID NO: 1962-1963 - skipped (2 entries)

SEQ ID NO: 1964 - DNA, 54 bp, synthetic construct; identical to SEQ ID NO: 138
  misc_feature 1..54: note = Description of Artificial Sequence: Synthetic oligonucleotide
  source 1..54: mol_type = other DNA

SEQ ID NO: 1965 - protein, 18 aa, synthetic construct
  REGION 1..18: note = Description of Artificial Sequence: Synthetic peptide
EGRGSLLTCGDVEENPGP

SEQ ID NO: 1966-1967 - skipped (2 entries)

SEQ ID NO: 1968 - DNA, 57 bp, synthetic construct; identical to SEQ ID NO: 1283
  misc_feature 1..57: note = Description of Artificial Sequence: Synthetic oligonucleotide
  source 1..57: mol_type = other DNA

SEQ ID NO: 1969 - protein, 19 aa, synthetic construct
  REGION 1..19: note = Description of Artificial Sequence: Synthetic peptide
ATNFSLLKQAGDVEENPGP

SEQ ID NO: 1970 - DNA, 516 bp, synthetic construct; identical to SEQ ID NO: 251
  misc_feature 1..516: note = Description of Artificial Sequence: Synthetic polynucleotide
  source 1..516: mol_type = other DNA

SEQ ID NO: 1971 - protein, 172 aa, synthetic construct; identical to SEQ ID NO: 240
  REGION 1..172: note = Description of Artificial Sequence: Synthetic polypeptide

SEQ ID NO: 1972-1973 - skipped (2 entries)

SEQ ID NO: 1974 - DNA, 186 bp, synthetic construct; identical to SEQ ID NO: 255
  misc_feature 1..186: note = Description of Artificial Sequence: Synthetic polynucleotide
  source 1..186: mol_type = other DNA

SEQ ID NO: 1975 - protein, 62 aa, synthetic construct; identical to SEQ ID NO: 216
  REGION 1..62: note = Description of Artificial Sequence: Synthetic polypeptide

SEQ ID NO: 1976-1977 - skipped (2 entries)

SEQ ID NO: 1978 - DNA, 321 bp, synthetic construct; identical to SEQ ID NO: 1553
  misc_feature 1..321: note = Description of Artificial Sequence: Synthetic polynucleotide
  source 1..321: mol_type = other DNA

SEQ ID NO: 1979 - protein, 107 aa, synthetic construct; identical to SEQ ID NO: 929
  REGION 1..107: note = Description of Artificial Sequence: Synthetic polypeptide

SEQ ID NO: 1980-1981 - skipped (2 entries)

SEQ ID NO: 1982 - DNA, 273 bp, synthetic construct; identical to SEQ ID NO: 1557
  misc_feature 1..273: note = Description of Artificial Sequence: Synthetic polynucleotide
  source 1..273: mol_type = other DNA

SEQ ID NO: 1983 - protein, 91 aa, synthetic construct; identical to SEQ ID NO: 1558
  REGION 1..91: note = Description of Artificial Sequence: Synthetic polypeptide

SEQ ID NO: 1984 - DNA, 27 bp, synthetic construct
  misc_feature 1..27: note = Description of Artificial Sequence: Synthetic oligonucleotide
  source 1..27: mol_type = other DNA
tcaggcggtggctcaggtccgcggtga

SEQ ID NO: 1985 - protein, 8 aa, synthetic construct
  REGION 1..8: note = Description of Artificial Sequence: Synthetic peptide
SGGGSGPR

SEQ ID NO: 1986 - DNA, 18 bp, synthetic construct
  misc_feature 1..18: note = Description of Artificial Sequence: Synthetic oligonucleotide
  source 1..18: mol_type = other DNA
atgctcgagcaattggag

SEQ ID NO: 1987 - protein, 6 aa, synthetic construct
  REGION 1..6: note = Description of Artificial Sequence: Synthetic peptide
MLEQLE

SEQ ID NO: 1988 - DNA, 321 bp, synthetic construct; identical to SEQ ID NO: 317
  misc_feature 1..321: note = Description of Artificial Sequence: Synthetic polynucleotide
  source 1..321: mol_type = other DNA

SEQ ID NO: 1989 - protein, 107 aa, synthetic construct; identical to SEQ ID NO: 3
  REGION 1..107: note = Description of Artificial Sequence: Synthetic polypeptide

SEQ ID NO: 1990 - DNA, 24 bp, synthetic construct
  misc_feature 1..24: note = Description of Artificial Sequence: Synthetic oligonucleotide
  source 1..24: mol_type = other DNA
tcaggcggtggctcaggtgtggac

SEQ ID NO: 1991 - protein, 8 aa, synthetic construct
  REGION 1..8: note = Description of Artificial Sequence: Synthetic peptide
SGGGSGVD

SEQ ID NO: 1992 - DNA, 858 bp, synthetic construct; identical to SEQ ID NO: 936
  misc_feature 1..858: note = Description of Artificial Sequence: Synthetic polynucleotide
  source 1..858: mol_type = other DNA

SEQ ID NO: 1993 - protein, 286 aa, synthetic construct; identical to SEQ ID NO: 937
  REGION 1..286: note = Description of Artificial Sequence: Synthetic polypeptide

SEQ ID NO: 1994 - DNA, 15 bp, synthetic construct
  misc_feature 1..15: note = Description of Artificial Sequence: Synthetic oligonucleotide
  source 1..15: mol_type = other DNA
ggatctggaccgcgg

SEQ ID NO: 1995 - protein, 5 aa, synthetic construct
  REGION 1..5: note = Description of Artificial Sequence: Synthetic peptide
GSGPR

SEQ ID NO: 1996 - DNA, 54 bp, synthetic construct; identical to SEQ ID NO: 138
  misc_feature 1..54: note = Description of Artificial Sequence: Synthetic oligonucleotide
  source 1..54: mol_type = other DNA

SEQ ID NO: 1997 - protein, 18 aa, synthetic construct
  REGION 1..18: note = Description of Artificial Sequence: Synthetic peptide
EGRGSLLTCGDVEENPGP

SEQ ID NO: 1998 - DNA, 12 bp, synthetic construct
  misc_feature 1..12: note = Description of Artificial Sequence: Synthetic oligonucleotide
  source 1..12: mol_type = other DNA
gcatgcgccacc

SEQ ID NO: 1999 - protein, 4 aa, synthetic construct
  REGION 1..4: note = Description of Artificial Sequence: Synthetic peptide
ACAT

SEQ ID NO: 2000 - DNA, 63 bp, synthetic construct; identical to SEQ ID NO: 448
  misc_feature 1..63: note = Description of Artificial Sequence: Synthetic oligonucleotide
  source 1..63: mol_type = other DNA

SEQ ID NO: 2001 - protein, 21 aa, synthetic construct
  REGION 1..21: note = Description of Artificial Sequence: Synthetic peptide
MEFGLSWLFLVAILKGVQCSR

SEQ ID NO: 2002 - DNA, 357 bp, synthetic construct; identical to SEQ ID NO: 168
  misc_feature 1..357: note = Description of Artificial Sequence: Synthetic polynucleotide
  source 1..357: mol_type = other DNA

SEQ ID NO: 2003 - protein, 119 aa, synthetic construct; identical to SEQ ID NO: 169
  REGION 1..119: note = Description of Artificial Sequence: Synthetic polypeptide

SEQ ID NO: 2004 - DNA, 45 bp, synthetic construct; identical to SEQ ID NO: 452
  misc_feature 1..45: note = Description of Artificial Sequence: Synthetic oligonucleotide
  source 1..45: mol_type = other DNA

SEQ ID NO: 2005 - protein, 15 aa, synthetic construct
  REGION 1..15: note = Description of Artificial Sequence: Synthetic peptide
GGGGSGGGGSGGGGS

SEQ ID NO: 2006 - DNA, 327 bp, synthetic construct; identical to SEQ ID NO: 164
  misc_feature 1..327: note = Description of Artificial Sequence: Synthetic polynucleotide
  source 1..327: mol_type = other DNA

SEQ ID NO: 2007 - protein, 112 aa, synthetic construct; identical to SEQ ID NO: 1008
  REGION 1..112: note = Description of Artificial Sequence: Synthetic polypeptide

SEQ ID NO: 2008-2009 - skipped (2 entries)

SEQ ID NO: 2010 - DNA, 48 bp, synthetic construct; identical to SEQ ID NO: 152
  misc_feature 1..48: note = Description of Artificial Sequence: Synthetic oligonucleotide
  source 1..48: mol_type = other DNA

SEQ ID NO: 2011 - protein, 16 aa, synthetic construct
  REGION 1..16: note = Description of Artificial Sequence: Synthetic peptide
ELPTQGTFSNVSTNVS

SEQ ID NO: 2012 - DNA, 336 bp, synthetic construct; identical to SEQ ID NO: 426
  misc_feature 1..336: note = Description of Artificial Sequence: Synthetic polynucleotide
  source 1..336: mol_type = other DNA

SEQ ID NO: 2013 - protein, 112 aa, synthetic construct; identical to SEQ ID NO: 161
  REGION 1..112: note = Description of Artificial Sequence: Synthetic polypeptide

SEQ ID NO: 2014 - DNA, 18 bp, synthetic construct
  misc_feature 1..18: note = Description of Artificial Sequence: Synthetic oligonucleotide
  source 1..18: mol_type = other DNA
atgctcgagcaattggag

SEQ ID NO: 2015 - protein, 6 aa, synthetic construct
  REGION 1..6: note = Description of Artificial Sequence: Synthetic peptide
MLEQLE

SEQ ID NO: 2016 - DNA, 321 bp, synthetic construct; identical to SEQ ID NO: 317
  misc_feature 1..321: note = Description of Artificial Sequence: Synthetic polynucleotide
  source 1..321: mol_type = other DNA

SEQ ID NO: 2017 - protein, 107 aa, synthetic construct; identical to SEQ ID NO: 3
  REGION 1..107: note = Description of Artificial Sequence: Synthetic polypeptide

SEQ ID NO: 2018 - DNA, 24 bp, synthetic construct
  misc_feature 1..24: note = Description of Artificial Sequence: Synthetic oligonucleotide
  source 1..24: mol_type = other DNA
tcaggcggtggctcaggtgtggac

SEQ ID NO: 2019 - protein, 8 aa, synthetic construct
  REGION 1..8: note = Description of Artificial Sequence: Synthetic peptide
SGGGSGVD

SEQ ID NO: 2020 - DNA, 858 bp, synthetic construct; identical to SEQ ID NO: 936
  misc_feature 1..858: note = Description of Artificial Sequence: Synthetic polynucleotide
  source 1..858: mol_type = other DNA

SEQ ID NO: 2021 - protein, 286 aa, synthetic construct; identical to SEQ ID NO: 937
  REGION 1..286: note = Description of Artificial Sequence: Synthetic polypeptide

SEQ ID NO: 2022 - DNA, 15 bp, synthetic construct
  misc_feature 1..15: note = Description of Artificial Sequence: Synthetic oligonucleotide
  source 1..15: mol_type = other DNA
ggatctggaccgcgg

SEQ ID NO: 2023 - protein, 5 aa, synthetic construct
  REGION 1..5: note = Description of Artificial Sequence: Synthetic peptide
GSGPR

SEQ ID NO: 2024 - DNA, 54 bp, synthetic construct; identical to SEQ ID NO: 138
  misc_feature 1..54: note = Description of Artificial Sequence: Synthetic oligonucleotide
  source 1..54: mol_type = other DNA

SEQ ID NO: 2025 - protein, 18 aa, synthetic construct
  REGION 1..18: note = Description of Artificial Sequence: Synthetic peptide
EGRGSLLTCGDVEENPGP

SEQ ID NO: 2026-2027 - skipped (2 entries)

SEQ ID NO: 2028 - DNA, 63 bp, synthetic construct; identical to SEQ ID NO: 142
  misc_feature 1..63: note = Description of Artificial Sequence: Synthetic oligonucleotide
  source 1..63: mol_type = other DNA

SEQ ID NO: 2029 - protein, 21 aa, synthetic construct
  REGION 1..21: note = Description of Artificial Sequence: Synthetic peptide
MEFGLSWLFLVAILKGVQCSR

SEQ ID NO: 2030 - DNA, 318 bp, synthetic construct; identical to SEQ ID NO: 1003
  misc_feature 1..318: note = Description of Artificial Sequence: Synthetic polynucleotide
  source 1..318: mol_type = other DNA

SEQ ID NO: 2031 - protein, 106 aa, synthetic construct; identical to SEQ ID NO: 1004
  REGION 1..106: note = Description of Artificial Sequence: Synthetic polypeptide

SEQ ID NO: 2032 - DNA, 24 bp, synthetic construct
  misc_feature 1..24: note = Description of Artificial Sequence: Synthetic oligonucleotide
  source 1..24: mol_type = other DNA
ggcggaggaagcggaggtgggggc

SEQ ID NO: 2033 - protein, 8 aa, synthetic construct
  REGION 1..8: note = Description of Artificial Sequence: Synthetic peptide
GGGSGGGG

SEQ ID NO: 2034 - DNA, 336 bp, synthetic construct; identical to SEQ ID NO: 1007
  misc_feature 1..336: note = Description of Artificial Sequence: Synthetic polynucleotide
  source 1..336: mol_type = other DNA

SEQ ID NO: 2035 - protein, 112 aa, synthetic construct; identical to SEQ ID NO: 1008
  REGION 1..112: note = Description of Artificial Sequence: Synthetic polypeptide

SEQ ID NO: 2036-2037 - skipped (2 entries)

SEQ ID NO: 2038 - DNA, 48 bp, synthetic construct; identical to SEQ ID NO: 152
  misc_feature 1..48: note = Description of Artificial Sequence: Synthetic oligonucleotide
  source 1..48: mol_type = other DNA

SEQ ID NO: 2039 - protein, 16 aa, synthetic construct
  REGION 1..16: note = Description of Artificial Sequence: Synthetic peptide
ELPTQGTFSNVSTNVS

SEQ ID NO: 2040 - DNA, 126 bp, synthetic construct; identical to SEQ ID NO: 154
  misc_feature 1..126: note = Description of Artificial Sequence: Synthetic polynucleotide
  source 1..126: mol_type = other DNA

SEQ ID NO: 2041 - protein, 42 aa, synthetic construct; identical to SEQ ID NO: 155
  REGION 1..42: note = Description of Artificial Sequence: Synthetic polypeptide

SEQ ID NO: 2042 - DNA, 111 bp, synthetic construct; identical to SEQ ID NO: 156
  misc_feature 1..111: note = Description of Artificial Sequence: Synthetic polynucleotide
  source 1..111: mol_type = other DNA

SEQ ID NO: 2043 - protein, 37 aa, synthetic construct; identical to SEQ ID NO: 157
  REGION 1..37: note = Description of Artificial Sequence: Synthetic polypeptide

SEQ ID NO: 2044-2045 - skipped (2 entries)

SEQ ID NO: 2046 - DNA, 336 bp, synthetic construct; identical to SEQ ID NO: 426
  misc_feature 1..336: note = Description of Artificial Sequence: Synthetic polynucleotide
  source 1..336: mol_type = other DNA

SEQ ID NO: 2047 - protein, 112 aa, synthetic construct; identical to SEQ ID NO: 161
  REGION 1..112: note = Description of Artificial Sequence: Synthetic polypeptide

SEQ ID NO: 2048 - DNA, 276 bp, synthetic construct
  misc_feature 1..276: note = Description of Artificial Sequence: Synthetic polynucleotide
  source 1..276: mol_type = other DNA
atgcaattggaaatgtggcatgaagggttggaagaagcttcaaggctgtacttcggagagaggaacgtgaagggcatgtttgaggttcttgaacctctgcacgccatgatggaacggggaccgcagacactgaaagaaacctcttttaatcaggcctacggcagagacctgatggaggcccaagaatggtgtagaaagtatatgaaatccggtaacgtgaaagacctgctccaggcctgggacctttattaccatgtgttcaggcggatcagtaag

SEQ ID NO: 2049 - protein, 92 aa, synthetic construct
  REGION 1..92: note = Description of Artificial Sequence: Synthetic polypeptide
MQLEMWHEGLEEASRLYFGERNVKGMFEVLEPLHAMMERGPQTLKETSFNQAYGRDLMEAQEWCRKYMKSGNVKDLLQAWDLYYHVFRRISK

SEQ ID NO: 2050 - DNA, 24 bp, synthetic construct
  misc_feature 1..24: note = Description of Artificial Sequence: Synthetic oligonucleotide
  source 1..24: mol_type = other DNA
tcaggcggtggcagcggccaattg

SEQ ID NO: 2051 - protein, 8 aa, synthetic construct
  REGION 1..8: note = Description of Artificial Sequence: Synthetic peptide
SGGGSGQL

SEQ ID NO: 2052 - DNA, 321 bp, synthetic construct
  misc_feature 1..321: note = Description of Artificial Sequence: Synthetic polynucleotide
  source 1..321: mol_type = other DNA
ggagtccaagtcgaaaccattagtcccggcgatggcagaacatttcctacaaggggacaaacatgtgtcgtccattatacaggcatgttggaggacggcaaaaagttcgacagtagtagagatcgcaataaacctttcaaattcatgttgggaaaacaagaagtcattaggggatgggaggagggcgtggctcaaatgtccgtcggccaacgcgctaagctcaccatcagccccgactacgcatacggcgctaccggacatcccggaattattccccctcacgctaccttggtgtttgacgtcgaactgttgaagctcgaa

SEQ ID NO: 2053 - protein, 107 aa, synthetic construct; identical to SEQ ID NO: 929
  REGION 1..107: note = Description of Artificial Sequence: Synthetic polypeptide

SEQ ID NO: 2054 - DNA, 18 bp, synthetic construct
  misc_feature 1..18: note = Description of Artificial Sequence: Synthetic oligonucleotide
  source 1..18: mol_type = other DNA
ggaagcatgcggatcgga

SEQ ID NO: 2055 - protein, 6 aa, synthetic construct
  REGION 1..6: note = Description of Artificial Sequence: Synthetic peptide
GSMRIG

SEQ ID NO: 2056 - DNA, 516 bp, synthetic construct; identical to SEQ ID NO: 251
  misc_feature 1..516: note = Description of Artificial Sequence: Synthetic polynucleotide
  source 1..516: mol_type = other DNA

SEQ ID NO: 2057 - protein, 172 aa, synthetic construct; identical to SEQ ID NO: 240
  REGION 1..172: note = Description of Artificial Sequence: Synthetic polypeptide

SEQ ID NO: 2058-2059 - skipped (2 entries)

SEQ ID NO: 2060 - DNA, 186 bp, synthetic construct; identical to SEQ ID NO: 255
  misc_feature 1..186: note = Description of Artificial Sequence: Synthetic polynucleotide
  source 1..186: mol_type = other DNA

SEQ ID NO: 2061 - protein, 62 aa, synthetic construct; identical to SEQ ID NO: 216
  REGION 1..62: note = Description of Artificial Sequence: Synthetic polypeptide

SEQ ID NO: 2062 - DNA, 15 bp, synthetic construct
  misc_feature 1..15: note = Description of Artificial Sequence: Synthetic oligonucleotide
  source 1..15: mol_type = other DNA
ggcagtgggccgcgg

SEQ ID NO: 2063 - protein, 5 aa, synthetic construct
  REGION 1..5: note = Description of Artificial Sequence: Synthetic peptide
GSGPR

SEQ ID NO: 2064 - DNA, 54 bp, synthetic construct; identical to SEQ ID NO: 138
  misc_feature 1..54: note = Description of Artificial Sequence: Synthetic oligonucleotide
  source 1..54: mol_type = other DNA

SEQ ID NO: 2065 - protein, 18 aa, synthetic construct
  REGION 1..18: note = Description of Artificial Sequence: Synthetic peptide
EGRGSLLTCGDVEENPGP

SEQ ID NO: 2066-2067 - skipped (2 entries)

SEQ ID NO: 2068 - DNA, 63 bp, synthetic construct; identical to SEQ ID NO: 142
  misc_feature 1..63: note = Description of Artificial Sequence: Synthetic oligonucleotide
  source 1..63: mol_type = other DNA

SEQ ID NO: 2069 - protein, 21 aa, synthetic construct
  REGION 1..21: note = Description of Artificial Sequence: Synthetic peptide
MEFGLSWLFLVAILKGVQCSR

SEQ ID NO: 2070 - DNA, 318 bp, synthetic construct; identical to SEQ ID NO: 1003
  misc_feature 1..318: note = Description of Artificial Sequence: Synthetic polynucleotide
  source 1..318: mol_type = other DNA

SEQ ID NO: 2071 - protein, 106 aa, synthetic construct; identical to SEQ ID NO: 1004
  REGION 1..106: note = Description of Artificial Sequence: Synthetic polypeptide

SEQ ID NO: 2072 - DNA, 24 bp, synthetic construct
  misc_feature 1..24: note = Description of Artificial Sequence: Synthetic oligonucleotide
  source 1..24: mol_type = other DNA
ggcggaggaagcggaggtgggggc

SEQ ID NO: 2073 - protein, 8 aa, synthetic construct
  REGION 1..8: note = Description of Artificial Sequence: Synthetic peptide
GGGSGGGG

SEQ ID NO: 2074 - DNA, 336 bp, synthetic construct; identical to SEQ ID NO: 1007
  misc_feature 1..336: note = Description of Artificial Sequence: Synthetic polynucleotide
  source 1..336: mol_type = other DNA

SEQ ID NO: 2075 - protein, 112 aa, synthetic construct; identical to SEQ ID NO: 1008
  REGION 1..112: note = Description of Artificial Sequence: Synthetic polypeptide

SEQ ID NO: 2076-2077 - skipped (2 entries)

SEQ ID NO: 2078 - DNA, 48 bp, synthetic construct; identical to SEQ ID NO: 152
  misc_feature 1..48: note = Description of Artificial Sequence: Synthetic oligonucleotide
  source 1..48: mol_type = other DNA

SEQ ID NO: 2079 - protein, 16 aa, synthetic construct
  REGION 1..16: note = Description of Artificial Sequence: Synthetic peptide
ELPTQGTFSNVSTNVS

SEQ ID NO: 2080 - DNA, 126 bp, synthetic construct; identical to SEQ ID NO: 154
  misc_feature 1..126: note = Description of Artificial Sequence: Synthetic polynucleotide
  source 1..126: mol_type = other DNA

SEQ ID NO: 2081 - protein, 42 aa, synthetic construct; identical to SEQ ID NO: 155
  REGION 1..42: note = Description of Artificial Sequence: Synthetic polypeptide

SEQ ID NO: 2082 - DNA, 111 bp, synthetic construct; identical to SEQ ID NO: 156
  misc_feature 1..111: note = Description of Artificial Sequence: Synthetic polynucleotide
  source 1..111: mol_type = other DNA

SEQ ID NO: 2083 - protein, 37 aa, synthetic construct; identical to SEQ ID NO: 157
  REGION 1..37: note = Description of Artificial Sequence: Synthetic polypeptide

SEQ ID NO: 2084-2085 - skipped (2 entries)

SEQ ID NO: 2086 - DNA, 336 bp, synthetic construct; identical to SEQ ID NO: 426
  misc_feature 1..336: note = Description of Artificial Sequence: Synthetic polynucleotide
  source 1..336: mol_type = other DNA

SEQ ID NO: 2087 - protein, 112 aa, synthetic construct; identical to SEQ ID NO: 161
  REGION 1..112: note = Description of Artificial Sequence: Synthetic polypeptide

SEQ ID NO: 2088 - DNA, 15 bp, synthetic construct
  misc_feature 1..15: note = Description of Artificial Sequence: Synthetic oligonucleotide
  source 1..15: mol_type = other DNA
atgcatatgctggag

SEQ ID NO: 2089 - protein, 5 aa, synthetic construct
  REGION 1..5: note = Description of Artificial Sequence: Synthetic peptide
MHMLE

SEQ ID NO: 2090 - DNA, 321 bp, synthetic construct; identical to SEQ ID NO: 317
  misc_feature 1..321: note = Description of Artificial Sequence: Synthetic polynucleotide
  source 1..321: mol_type = other DNA

SEQ ID NO: 2091 - protein, 107 aa, synthetic construct; identical to SEQ ID NO: 3
  REGION 1..107: note = Description of Artificial Sequence: Synthetic polypeptide

SEQ ID NO: 2092 - DNA, 24 bp, synthetic construct
  misc_feature 1..24: note = Description of Artificial Sequence: Synthetic oligonucleotide
  source 1..24: mol_type = other DNA
tcaggcggtggctcaggtgtggac

SEQ ID NO: 2093 - protein, 8 aa, synthetic construct
  REGION 1..8: note = Description of Artificial Sequence: Synthetic peptide
SGGGSGVD

SEQ ID NO: 2094 - DNA, 858 bp, synthetic construct; identical to SEQ ID NO: 936
  misc_feature 1..858: note = Description of Artificial Sequence: Synthetic polynucleotide
  source 1..858: mol_type = other DNA

SEQ ID NO: 2095 - protein, 286 aa, synthetic construct; identical to SEQ ID NO: 937
  REGION 1..286: note = Description of Artificial Sequence: Synthetic polypeptide

SEQ ID NO: 2096 - DNA, 19 bp, synthetic construct
  misc_feature 1..19: note = Description of Artificial Sequence: Synthetic oligonucleotide
  source 1..19: mol_type = other DNA
agcggccgcaggtagcggg

SEQ ID NO: 2097 - protein, 6 aa, synthetic construct
  REGION 1..6: note = Description of Artificial Sequence: Synthetic peptide
AAAGSG

SEQ ID NO: 2098 - DNA, 516 bp, synthetic construct; identical to SEQ ID NO: 251
  misc_feature 1..516: note = Description of Artificial Sequence: Synthetic polynucleotide
  source 1..516: mol_type = other DNA

SEQ ID NO: 2099 - protein, 172 aa, synthetic construct; identical to SEQ ID NO: 240
  REGION 1..172: note = Description of Artificial Sequence: Synthetic polypeptide

SEQ ID NO: 2100-2101 - skipped (2 entries)

SEQ ID NO: 2102 - DNA, 186 bp, synthetic construct; identical to SEQ ID NO: 255
  misc_feature 1..186: note = Description of Artificial Sequence: Synthetic polynucleotide
  source 1..186: mol_type = other DNA

SEQ ID NO: 2103 - protein, 62 aa, synthetic construct; identical to SEQ ID NO: 216
  REGION 1..62: note = Description of Artificial Sequence: Synthetic polypeptide

SEQ ID NO: 2104 - DNA, 18 bp, synthetic construct
  misc_feature 1..18: note = Description of Artificial Sequence: Synthetic oligonucleotide
  source 1..18: mol_type = other DNA
gcggccgcaggtagcggg

SEQ ID NO: 2105 - protein, 6 aa, synthetic construct
  REGION 1..6: note = Description of Artificial Sequence: Synthetic peptide
AAAGSG

SEQ ID NO: 2106 - DNA, 57 bp, synthetic construct; identical to SEQ ID NO: 1283
  misc_feature 1..57: note = Description of Artificial Sequence: Synthetic oligonucleotide
  source 1..57: mol_type = other DNA

SEQ ID NO: 2107 - protein, 19 aa, synthetic construct
  REGION 1..19: note = Description of Artificial Sequence: Synthetic peptide
ATNFSLLKQAGDVEENPGP

SEQ ID NO: 2108-2109 - skipped (2 entries)

SEQ ID NO: 2110 - DNA, 321 bp, synthetic construct; identical to SEQ ID NO: 1553
  misc_feature 1..321: note = Description of Artificial Sequence: Synthetic polynucleotide
  source 1..321: mol_type = other DNA

SEQ ID NO: 2111 - protein, 107 aa, synthetic construct; identical to SEQ ID NO: 929
  REGION 1..107: note = Description of Artificial Sequence: Synthetic polypeptide

SEQ ID NO: 2112-2113 - skipped (2 entries)

SEQ ID NO: 2114 - DNA, 273 bp, synthetic construct; identical to SEQ ID NO: 1557
  misc_feature 1..273: note = Description of Artificial Sequence: Synthetic polynucleotide
  source 1..273: mol_type = other DNA

SEQ ID NO: 2115 - protein, 91 aa, synthetic construct; identical to SEQ ID NO: 1558
  REGION 1..91: note = Description of Artificial Sequence: Synthetic polypeptide

SEQ ID NO: 2116-2117 - skipped (2 entries)

SEQ ID NO: 2118 - DNA, 15 bp, synthetic construct
  misc_feature 1..15: note = Description of Artificial Sequence: Synthetic oligonucleotide
  source 1..15: mol_type = other DNA
ggatctggaccgcgg

SEQ ID NO: 2119 - protein, 5 aa, synthetic construct
  REGION 1..5: note = Description of Artificial Sequence: Synthetic peptide
GSGPR

SEQ ID NO: 2120 - DNA, 54 bp, synthetic construct; identical to SEQ ID NO: 138
  misc_feature 1..54: note = Description of Artificial Sequence: Synthetic oligonucleotide
  source 1..54: mol_type = other DNA

SEQ ID NO: 2121 - protein, 18 aa, synthetic construct
  REGION 1..18: note = Description of Artificial Sequence: Synthetic peptide
EGRGSLLTCGDVEENPGP

SEQ ID NO: 2122 - DNA, 12 bp, synthetic construct
  misc_feature 1..12: note = Description of Artificial Sequence: Synthetic oligonucleotide
  source 1..12: mol_type = other DNA
gcatgcgccacc

SEQ ID NO: 2123 - protein, 4 aa, synthetic construct
  REGION 1..4: note = Description of Artificial Sequence: Synthetic peptide
ACAT

SEQ ID NO: 2124 - DNA, 63 bp, synthetic construct; identical to SEQ ID NO: 448
  misc_feature 1..63: note = Description of Artificial Sequence: Synthetic oligonucleotide
  source 1..63: mol_type = other DNA

SEQ ID NO: 2125 - protein, 21 aa, synthetic construct
  REGION 1..21: note = Description of Artificial Sequence: Synthetic peptide
MEFGLSWLFLVAILKGVQCSR

SEQ ID NO: 2126 - DNA, 357 bp, synthetic construct; identical to SEQ ID NO: 168
  misc_feature 1..357: note = Description of Artificial Sequence: Synthetic polynucleotide
  source 1..357: mol_type = other DNA

SEQ ID NO: 2127 - protein, 119 aa, synthetic construct; identical to SEQ ID NO: 169
  REGION 1..119: note = Description of Artificial Sequence: Synthetic polypeptide

SEQ ID NO: 2128 - DNA, 45 bp, synthetic construct; identical to SEQ ID NO: 452
  misc_feature 1..45: note = Description of Artificial Sequence: Synthetic oligonucleotide
  source 1..45: mol_type = other DNA

SEQ ID NO: 2129 - protein, 15 aa, synthetic construct
  REGION 1..15: note = Description of Artificial Sequence: Synthetic peptide
GGGGSGGGGSGGGGS

SEQ ID NO: 2130 - DNA, 327 bp, synthetic construct; identical to SEQ ID NO: 164
  misc_feature 1..327: note = Description of Artificial Sequence: Synthetic polynucleotide
  source 1..327: mol_type = other DNA

SEQ ID NO: 2131 - protein, 112 aa, synthetic construct; identical to SEQ ID NO: 1008
  REGION 1..112: note = Description of Artificial Sequence: Synthetic polypeptide

SEQ ID NO: 2132-2133 - skipped (2 entries)

SEQ ID NO: 2134 - DNA, 48 bp, synthetic construct; identical to SEQ ID NO: 152
  misc_feature 1..48: note = Description of Artificial Sequence: Synthetic oligonucleotide
  source 1..48: mol_type = other DNA

SEQ ID NO: 2135 - protein, 16 aa, synthetic construct
  REGION 1..16: note = Description of Artificial Sequence: Synthetic peptide
ELPTQGTFSNVSTNVS

SEQ ID NO: 2136 - DNA, 336 bp, synthetic construct; identical to SEQ ID NO: 426
  misc_feature 1..336: note = Description of Artificial Sequence: Synthetic polynucleotide
  source 1..336: mol_type = other DNA

SEQ ID NO: 2137 - protein, 112 aa, synthetic construct; identical to SEQ ID NO: 161
  REGION 1..112: note = Description of Artificial Sequence: Synthetic polypeptide

SEQ ID NO: 2138 - DNA, 516 bp, synthetic construct; identical to SEQ ID NO: 251
  misc_feature 1..516: note = Description of Artificial Sequence: Synthetic polynucleotide
  source 1..516: mol_type = other DNA

SEQ ID NO: 2139 - protein, 172 aa, synthetic construct; identical to SEQ ID NO: 240
  REGION 1..172: note = Description of Artificial Sequence: Synthetic polypeptide

SEQ ID NO: 2140-2141 - skipped (2 entries)

SEQ ID NO: 2142 - DNA, 186 bp, synthetic construct; identical to SEQ ID NO: 255
  misc_feature 1..186: note = Description of Artificial Sequence: Synthetic polynucleotide
  source 1..186: mol_type = other DNA

SEQ ID NO: 2143 - protein, 62 aa, synthetic construct; identical to SEQ ID NO: 216
  REGION 1..62: note = Description of Artificial Sequence: Synthetic polypeptide

SEQ ID NO: 2144-2145 - skipped (2 entries)

SEQ ID NO: 2146 - DNA, 321 bp, synthetic construct; identical to SEQ ID NO: 1553
  misc_feature 1..321: note = Description of Artificial Sequence: Synthetic polynucleotide
  source 1..321: mol_type = other DNA

SEQ ID NO: 2147 - protein, 107 aa, synthetic construct; identical to SEQ ID NO: 929
  REGION 1..107: note = Description of Artificial Sequence: Synthetic polypeptide

SEQ ID NO: 2148-2149 - skipped (2 entries)

SEQ ID NO: 2150 - DNA, 273 bp, synthetic construct; identical to SEQ ID NO: 1557
  misc_feature 1..273: note = Description of Artificial Sequence: Synthetic polynucleotide
  source 1..273: mol_type = other DNA

SEQ ID NO: 2151 - protein, 91 aa, synthetic construct; identical to SEQ ID NO: 1558
  REGION 1..91: note = Description of Artificial Sequence: Synthetic polypeptide

SEQ ID NO: 2152 - DNA, 18 bp, synthetic construct
  misc_feature 1..18: note = Description of Artificial Sequence: Synthetic oligonucleotide
  source 1..18: mol_type = other DNA
gcggccgcaggtagcggg

SEQ ID NO: 2153 - protein, 6 aa, synthetic construct
  REGION 1..6: note = Description of Artificial Sequence: Synthetic peptide
AAAGSG

SEQ ID NO: 2154 - DNA, 57 bp, synthetic construct; identical to SEQ ID NO: 1283
  misc_feature 1..57: note = Description of Artificial Sequence: Synthetic oligonucleotide
  source 1..57: mol_type = other DNA

SEQ ID NO: 2155 - protein, 19 aa, synthetic construct
  REGION 1..19: note = Description of Artificial Sequence: Synthetic peptide
ATNFSLLKQAGDVEENPGP

SEQ ID NO: 2156-2157 - skipped (2 entries)

SEQ ID NO: 2158 - DNA, 321 bp, synthetic construct; identical to SEQ ID NO: 317
  misc_feature 1..321: note = Description of Artificial Sequence: Synthetic polynucleotide
  source 1..321: mol_type = other DNA

SEQ ID NO: 2159 - protein, 107 aa, synthetic construct; identical to SEQ ID NO: 3
  REGION 1..107: note = Description of Artificial Sequence: Synthetic polypeptide

SEQ ID NO: 2160 - DNA, 24 bp, synthetic construct
  misc_feature 1..24: note = Description of Artificial Sequence: Synthetic oligonucleotide
  source 1..24: mol_type = other DNA
tcaggcggtggctcaggtgtggac

SEQ ID NO: 2161 - protein, 8 aa, synthetic construct
  REGION 1..8: note = Description of Artificial Sequence: Synthetic peptide
SGGGSGVD

SEQ ID NO: 2162 - DNA, 858 bp, synthetic construct; identical to SEQ ID NO: 936
  misc_feature 1..858: note = Description of Artificial Sequence: Synthetic polynucleotide
  source 1..858: mol_type = other DNA

SEQ ID NO: 2163 - protein, 286 aa, synthetic construct; identical to SEQ ID NO: 937
  REGION 1..286: note = Description of Artificial Sequence: Synthetic polypeptide

SEQ ID NO: 2164 - DNA, 15 bp, synthetic construct
  misc_feature 1..15: note = Description of Artificial Sequence: Synthetic oligonucleotide
  source 1..15: mol_type = other DNA
ggatctggaccgcgg

SEQ ID NO: 2165 - protein, 5 aa, synthetic construct
  REGION 1..5: note = Description of Artificial Sequence: Synthetic peptide
GSGPR

SEQ ID NO: 2166 - DNA, 54 bp, synthetic construct; identical to SEQ ID NO: 138
  misc_feature 1..54: note = Description of Artificial Sequence: Synthetic oligonucleotide
  source 1..54: mol_type = other DNA

SEQ ID NO: 2167 - protein, 18 aa, synthetic construct
  REGION 1..18: note = Description of Artificial Sequence: Synthetic peptide
EGRGSLLTCGDVEENPGP

SEQ ID NO: 2168 - DNA, 12 bp, synthetic construct
  misc_feature 1..12: note = Description of Artificial Sequence: Synthetic oligonucleotide
  source 1..12: mol_type = other DNA
gcatgcgccacc

SEQ ID NO: 2169 - protein, 4 aa, synthetic construct
  REGION 1..4: note = Description of Artificial Sequence: Synthetic peptide
ACAT

SEQ ID NO: 2170 - DNA, 63 bp, synthetic construct; identical to SEQ ID NO: 448
  misc_feature 1..63: note = Description of Artificial Sequence: Synthetic oligonucleotide
  source 1..63: mol_type = other DNA

SEQ ID NO: 2171 - protein, 21 aa, synthetic construct
  REGION 1..21: note = Description of Artificial Sequence: Synthetic peptide
MEFGLSWLFLVAILKGVQCSR

SEQ ID NO: 2172 - DNA, 357 bp, synthetic construct; identical to SEQ ID NO: 168
  misc_feature 1..357: note = Description of Artificial Sequence: Synthetic polynucleotide
  source 1..357: mol_type = other DNA

SEQ ID NO: 2173 - protein, 119 aa, synthetic construct; identical to SEQ ID NO: 169
  REGION 1..119: note = Description of Artificial Sequence: Synthetic polypeptide

SEQ ID NO: 2174 - DNA, 45 bp, synthetic construct; identical to SEQ ID NO: 452
  misc_feature 1..45: note = Description of Artificial Sequence: Synthetic oligonucleotide
  source 1..45: mol_type = other DNA

SEQ ID NO: 2175 - protein, 15 aa, synthetic construct
  REGION 1..15: note = Description of Artificial Sequence: Synthetic peptide
GGGGSGGGGSGGGGS

SEQ ID NO: 2176 - DNA, 327 bp, synthetic construct; identical to SEQ ID NO: 164
  misc_feature 1..327: note = Description of Artificial Sequence: Synthetic polynucleotide
  source 1..327: mol_type = other DNA

SEQ ID NO: 2177 - protein, 112 aa, synthetic construct; identical to SEQ ID NO: 1008
  REGION 1..112: note = Description of Artificial Sequence: Synthetic polypeptide

SEQ ID NO: 2178-2179 - skipped (2 entries)

SEQ ID NO: 2180 - DNA, 48 bp, synthetic construct; identical to SEQ ID NO: 152
  misc_feature 1..48: note = Description of Artificial Sequence: Synthetic oligonucleotide
  source 1..48: mol_type = other DNA

SEQ ID NO: 2181 - protein, 16 aa, synthetic construct
  REGION 1..16: note = Description of Artificial Sequence: Synthetic peptide
ELPTQGTFSNVSTNVS

SEQ ID NO: 2182 - DNA, 336 bp, synthetic construct; identical to SEQ ID NO: 426
  misc_feature 1..336: note = Description of Artificial Sequence: Synthetic polynucleotide
  source 1..336: mol_type = other DNA

SEQ ID NO: 2183 - protein, 112 aa, synthetic construct; identical to SEQ ID NO: 161
  REGION 1..112: note = Description of Artificial Sequence: Synthetic polypeptide

SEQ ID NO: 2184 - DNA, 516 bp, synthetic construct; identical to SEQ ID NO: 251
  misc_feature 1..516: note = Description of Artificial Sequence: Synthetic polynucleotide
  source 1..516: mol_type = other DNA

SEQ ID NO: 2185 - protein, 172 aa, synthetic construct; identical to SEQ ID NO: 240
  REGION 1..172: note = Description of Artificial Sequence: Synthetic polypeptide

SEQ ID NO: 2186-2187 - skipped (2 entries)

SEQ ID NO: 2188 - DNA, 186 bp, synthetic construct; identical to SEQ ID NO: 255
  misc_feature 1..186: note = Description of Artificial Sequence: Synthetic polynucleotide
  source 1..186: mol_type = other DNA

SEQ ID NO: 2189 - protein, 62 aa, synthetic construct; identical to SEQ ID NO: 216
  REGION 1..62: note = Description of Artificial Sequence: Synthetic polypeptide

SEQ ID NO: 2190-2191 - skipped (2 entries)

SEQ ID NO: 2192 - DNA, 321 bp, synthetic construct; identical to SEQ ID NO: 1553
  misc_feature 1..321: note = Description of Artificial Sequence: Synthetic polynucleotide
  source 1..321: mol_type = other DNA

SEQ ID NO: 2193 - protein, 107 aa, synthetic construct; identical to SEQ ID NO: 929
  REGION 1..107: note = Description of Artificial Sequence: Synthetic polypeptide

SEQ ID NO: 2194-2195 - skipped (2 entries)

SEQ ID NO: 2196 - DNA, 273 bp, synthetic construct; identical to SEQ ID NO: 1557
  misc_feature 1..273: note = Description of Artificial Sequence: Synthetic polynucleotide
  source 1..273: mol_type = other DNA

SEQ ID NO: 2197 - protein, 91 aa, synthetic construct; identical to SEQ ID NO: 1558
  REGION 1..91: note = Description of Artificial Sequence: Synthetic polypeptide

SEQ ID NO: 2198 - DNA, 18 bp, synthetic construct
  misc_feature 1..18: note = Description of Artificial Sequence: Synthetic oligonucleotide
  source 1..18: mol_type = other DNA
gcggccgcaggtagcggg

SEQ ID NO: 2199 - protein, 6 aa, synthetic construct
  REGION 1..6: note = Description of Artificial Sequence: Synthetic peptide
AAAGSG

SEQ ID NO: 2200 - DNA, 57 bp, synthetic construct; identical to SEQ ID NO: 1283
  misc_feature 1..57: note = Description of Artificial Sequence: Synthetic oligonucleotide
  source 1..57: mol_type = other DNA

SEQ ID NO: 2201 - protein, 19 aa, synthetic construct
  REGION 1..19: note = Description of Artificial Sequence: Synthetic peptide
ATNFSLLKQAGDVEENPGP

SEQ ID NO: 2202 - DNA, 15 bp, synthetic construct
  misc_feature 1..15: note = Description of Artificial Sequence: Synthetic oligonucleotide
  source 1..15: mol_type = other DNA
atgcatatgctggag

SEQ ID NO: 2203 - protein, 5 aa, synthetic construct
  REGION 1..5: note = Description of Artificial Sequence: Synthetic peptide
MHMLE

SEQ ID NO: 2204 - DNA, 321 bp, synthetic construct; identical to SEQ ID NO: 317
  misc_feature 1..321: note = Description of Artificial Sequence: Synthetic polynucleotide
  source 1..321: mol_type = other DNA

SEQ ID NO: 2205 - protein, 107 aa, synthetic construct; identical to SEQ ID NO: 3
  REGION 1..107: note = Description of Artificial Sequence: Synthetic polypeptide

SEQ ID NO: 2206 - DNA, 24 bp, synthetic construct
  misc_feature 1..24: note = Description of Artificial Sequence: Synthetic oligonucleotide
  source 1..24: mol_type = other DNA
tcaggcggtggctcaggtgtggac

SEQ ID NO: 2207 - protein, 8 aa, synthetic construct
  REGION 1..8: note = Description of Artificial Sequence: Synthetic peptide
SGGGSGVD

SEQ ID NO: 2208 - DNA, 858 bp, synthetic construct; identical to SEQ ID NO: 936
  misc_feature 1..858: note = Description of Artificial Sequence: Synthetic polynucleotide
  source 1..858: mol_type = other DNA

SEQ ID NO: 2209 - protein, 286 aa, synthetic construct; identical to SEQ ID NO: 937
  REGION 1..286: note = Description of Artificial Sequence: Synthetic polypeptide

SEQ ID NO: 2210 - DNA, 15 bp, synthetic construct
  misc_feature 1..15: note = Description of Artificial Sequence: Synthetic oligonucleotide
  source 1..15: mol_type = other DNA
ggatctggaccgcgg

SEQ ID NO: 2211 - protein, 5 aa, synthetic construct
  REGION 1..5: note = Description of Artificial Sequence: Synthetic peptide
GSGPR

SEQ ID NO: 2212 - DNA, 54 bp, synthetic construct; identical to SEQ ID NO: 138
  misc_feature 1..54: note = Description of Artificial Sequence: Synthetic oligonucleotide
  source 1..54: mol_type = other DNA

SEQ ID NO: 2213 - protein, 18 aa, synthetic construct
  REGION 1..18: note = Description of Artificial Sequence: Synthetic peptide
EGRGSLLTCGDVEENPGP

SEQ ID NO: 2214-2215 - skipped (2 entries)

SEQ ID NO: 2216 - DNA, 63 bp, synthetic construct; identical to SEQ ID NO: 142
  misc_feature 1..63: note = Description of Artificial Sequence: Synthetic oligonucleotide
  source 1..63: mol_type = other DNA

SEQ ID NO: 2217 - protein, 21 aa, synthetic construct
  REGION 1..21: note = Description of Artificial Sequence: Synthetic peptide
MEFGLSWLFLVAILKGVQCSR

SEQ ID NO: 2218 - DNA, 318 bp, synthetic construct; identical to SEQ ID NO: 1003
  misc_feature 1..318: note = Description of Artificial Sequence: Synthetic polynucleotide
  source 1..318: mol_type = other DNA

SEQ ID NO: 2219 - protein, 106 aa, synthetic construct; identical to SEQ ID NO: 1004
  REGION 1..106: note = Description of Artificial Sequence: Synthetic polypeptide

SEQ ID NO: 2220 - DNA, 24 bp, synthetic construct
  misc_feature 1..24: note = Description of Artificial Sequence: Synthetic oligonucleotide
  source 1..24: mol_type = other DNA
ggcggaggaagcggaggtgggggc

SEQ ID NO: 2221 - protein, 8 aa, synthetic construct
  REGION 1..8: note = Description of Artificial Sequence: Synthetic peptide
GGGSGGGG

SEQ ID NO: 2222 - DNA, 336 bp, synthetic construct; identical to SEQ ID NO: 1007
  misc_feature 1..336: note = Description of Artificial Sequence: Synthetic polynucleotide
  source 1..336: mol_type = other DNA

SEQ ID NO: 2223 - protein, 112 aa, synthetic construct; identical to SEQ ID NO: 1008
  REGION 1..112: note = Description of Artificial Sequence: Synthetic polypeptide

SEQ ID NO: 2224-2225 - skipped (2 entries)

SEQ ID NO: 2226 - DNA, 48 bp, synthetic construct; identical to SEQ ID NO: 152
  misc_feature 1..48: note = Description of Artificial Sequence: Synthetic oligonucleotide
  source 1..48: mol_type = other DNA

SEQ ID NO: 2227 - protein, 16 aa, synthetic construct
  REGION 1..16: note = Description of Artificial Sequence: Synthetic peptide
ELPTQGTFSNVSTNVS

SEQ ID NO: 2228 - DNA, 336 bp, synthetic construct; identical to SEQ ID NO: 426
  misc_feature 1..336: note = Description of Artificial Sequence: Synthetic polynucleotide
  source 1..336: mol_type = other DNA

SEQ ID NO: 2229 - protein, 112 aa, synthetic construct; identical to SEQ ID NO: 161
  REGION 1..112: note = Description of Artificial Sequence: Synthetic polypeptide

SEQ ID NO: 2230 - DNA, 273 bp, synthetic construct
  misc_feature 1..273: note = Description of Artificial Sequence: Synthetic polynucleotide
  source 1..273: mol_type = other DNA
atgttggaaatgtggcatgaagggttggaagaagcttcaaggctgtacttcggagagaggaacgtgaagggcatgtttgaggttcttgaacctctgcacgccatgatggaacggggaccgcagacactgaaagaaacctcttttaatcaggcctacggcagagacctgatggaggcccaagaatggtgtagaaagtatatgaaatccggtaacgtgaaagacctgctccaggcctgggacctttattaccatgtgttcaggcggatcagtaag

SEQ ID NO: 2231 - protein, 91 aa, synthetic construct
  REGION 1..91: note = Description of Artificial Sequence: Synthetic polypeptide
MLEMWHEGLEEASRLYFGERNVKGMFEVLEPLHAMMERGPQTLKETSFNQAYGRDLMEAQEWCRKYMKSGNVKDLLQAWDLYYHVFRRISK

SEQ ID NO: 2232-2233 - skipped (2 entries)

SEQ ID NO: 2234 - DNA, 321 bp, synthetic construct; identical to SEQ ID NO: 1553
  misc_feature 1..321: note = Description of Artificial Sequence: Synthetic polynucleotide
  source 1..321: mol_type = other DNA

SEQ ID NO: 2235 - protein, 107 aa, synthetic construct; identical to SEQ ID NO: 929
  REGION 1..107: note = Description of Artificial Sequence: Synthetic polypeptide

SEQ ID NO: 2236 - DNA, 516 bp, synthetic construct; identical to SEQ ID NO: 251
  misc_feature 1..516: note = Description of Artificial Sequence: Synthetic polynucleotide
  source 1..516: mol_type = other DNA

SEQ ID NO: 2237 - protein, 172 aa, synthetic construct; identical to SEQ ID NO: 240
  REGION 1..172: note = Description of Artificial Sequence: Synthetic polypeptide

SEQ ID NO: 2238-2239 - skipped (2 entries)

SEQ ID NO: 2240 - DNA, 186 bp, synthetic construct; identical to SEQ ID NO: 255
  misc_feature 1..186: note = Description of Artificial Sequence: Synthetic polynucleotide
  source 1..186: mol_type = other DNA

SEQ ID NO: 2241 - protein, 62 aa, synthetic construct; identical to SEQ ID NO: 216
  REGION 1..62: note = Description of Artificial Sequence: Synthetic polypeptide

SEQ ID NO: 2242-2243 - skipped (2 entries)

SEQ ID NO: 2244 - DNA, 57 bp, synthetic construct; identical to SEQ ID NO: 1283
  misc_feature 1..57: note = Description of Artificial Sequence: Synthetic oligonucleotide
  source 1..57: mol_type = other DNA

SEQ ID NO: 2245 - protein, 19 aa, synthetic construct
  REGION 1..19: note = Description of Artificial Sequence: Synthetic peptide
ATNFSLLKQAGDVEENPGP

SEQ ID NO: 2246 - DNA, 15 bp, synthetic construct
  misc_feature 1..15: note = Description of Artificial Sequence: Synthetic oligonucleotide
  source 1..15: mol_type = other DNA
atgcatatgctggag

SEQ ID NO: 2247 - protein, 5 aa, synthetic construct
  REGION 1..5: note = Description of Artificial Sequence: Synthetic peptide
MHMLE

SEQ ID NO: 2248 - DNA, 321 bp, synthetic construct; identical to SEQ ID NO: 317
  misc_feature 1..321: note = Description of Artificial Sequence: Synthetic polynucleotide
  source 1..321: mol_type = other DNA

SEQ ID NO: 2249 - protein, 107 aa, synthetic construct; identical to SEQ ID NO: 3
  REGION 1..107: note = Description of Artificial Sequence: Synthetic polypeptide

SEQ ID NO: 2250 - DNA, 24 bp, synthetic construct
  misc_feature 1..24: note = Description of Artificial Sequence: Synthetic oligonucleotide
  source 1..24: mol_type = other DNA
tcaggcggtggctcaggtgtggac

SEQ ID NO: 2251 - protein, 8 aa, synthetic construct
  REGION 1..8: note = Description of Artificial Sequence: Synthetic peptide
SGGGSGVD

SEQ ID NO: 2252 - DNA, 858 bp, synthetic construct; identical to SEQ ID NO: 936
  misc_feature 1..858: note = Description of Artificial Sequence: Synthetic polynucleotide
  source 1..858: mol_type = other DNA

SEQ ID NO: 2253 - protein, 286 aa, synthetic construct; identical to SEQ ID NO: 937
  REGION 1..286: note = Description of Artificial Sequence: Synthetic polypeptide

SEQ ID NO: 2254 - DNA, 15 bp, synthetic construct
  misc_feature 1..15: note = Description of Artificial Sequence: Synthetic oligonucleotide
  source 1..15: mol_type = other DNA
ggatctggaccgcgg

SEQ ID NO: 2255 - protein, 5 aa, synthetic construct
  REGION 1..5: note = Description of Artificial Sequence: Synthetic peptide
GSGPR

SEQ ID NO: 2256 - DNA, 54 bp, synthetic construct; identical to SEQ ID NO: 138
  misc_feature 1..54: note = Description of Artificial Sequence: Synthetic oligonucleotide
  source 1..54: mol_type = other DNA

SEQ ID NO: 2257 - protein, 18 aa, synthetic construct
  REGION 1..18: note = Description of Artificial Sequence: Synthetic peptide
EGRGSLLTCGDVEENPGP

SEQ ID NO: 2258-2259 - skipped (2 entries)

SEQ ID NO: 2260 - DNA, 63 bp, synthetic construct; identical to SEQ ID NO: 142
  misc_feature 1..63: note = Description of Artificial Sequence: Synthetic oligonucleotide
  source 1..63: mol_type = other DNA

SEQ ID NO: 2261 - protein, 21 aa, synthetic construct
  REGION 1..21: note = Description of Artificial Sequence: Synthetic peptide
MEFGLSWLFLVAILKGVQCSR

SEQ ID NO: 2262 - DNA, 318 bp, synthetic construct; identical to SEQ ID NO: 1003
  misc_feature 1..318: note = Description of Artificial Sequence: Synthetic polynucleotide
  source 1..318: mol_type = other DNA

SEQ ID NO: 2263 - protein, 106 aa, synthetic construct; identical to SEQ ID NO: 1004
  REGION 1..106: note = Description of Artificial Sequence: Synthetic polypeptide

SEQ ID NO: 2264 - DNA, 24 bp, synthetic construct
  misc_feature 1..24: note = Description of Artificial Sequence: Synthetic oligonucleotide
  source 1..24: mol_type = other DNA
ggcggaggaagcggaggtgggggc

SEQ ID NO: 2265 - protein, 8 aa, synthetic construct
  REGION 1..8: note = Description of Artificial Sequence: Synthetic peptide
GGGSGGGG

SEQ ID NO: 2266 - DNA, 336 bp, synthetic construct; identical to SEQ ID NO: 1007
  misc_feature 1..336: note = Description of Artificial Sequence: Synthetic polynucleotide
  source 1..336: mol_type = other DNA

SEQ ID NO: 2267 - protein, 112 aa, synthetic construct; identical to SEQ ID NO: 1008
  REGION 1..112: note = Description of Artificial Sequence: Synthetic polypeptide

SEQ ID NO: 2268-2269 - skipped (2 entries)

SEQ ID NO: 2270 - DNA, 48 bp, synthetic construct; identical to SEQ ID NO: 152
  misc_feature 1..48: note = Description of Artificial Sequence: Synthetic oligonucleotide
  source 1..48: mol_type = other DNA

SEQ ID NO: 2271 - protein, 16 aa, synthetic construct
  REGION 1..16: note = Description of Artificial Sequence: Synthetic peptide
ELPTQGTFSNVSTNVS

SEQ ID NO: 2272 - DNA, 336 bp, synthetic construct; identical to SEQ ID NO: 426
  misc_feature 1..336: note = Description of Artificial Sequence: Synthetic polynucleotide
  source 1..336: mol_type = other DNA

SEQ ID NO: 2273 - protein, 112 aa, synthetic construct; identical to SEQ ID NO: 161
  REGION 1..112: note = Description of Artificial Sequence: Synthetic polypeptide

SEQ ID NO: 2274 - DNA, 273 bp, synthetic construct; identical to SEQ ID NO: 2230
  misc_feature 1..273: note = Description of Artificial Sequence: Synthetic polynucleotide
  source 1..273: mol_type = other DNA

SEQ ID NO: 2275 - protein, 91 aa, synthetic construct; identical to SEQ ID NO: 2231
  REGION 1..91: note = Description of Artificial Sequence: Synthetic polypeptide

SEQ ID NO: 2276-2277 - skipped (2 entries)

SEQ ID NO: 2278 - DNA, 321 bp, synthetic construct; identical to SEQ ID NO: 1553
  misc_feature 1..321: note = Description of Artificial Sequence: Synthetic polynucleotide
  source 1..321: mol_type = other DNA

SEQ ID NO: 2279 - protein, 107 aa, synthetic construct; identical to SEQ ID NO: 929
  REGION 1..107: note = Description of Artificial Sequence: Synthetic polypeptide

SEQ ID NO: 2280 - DNA, 516 bp, synthetic construct; identical to SEQ ID NO: 251
  misc_feature 1..516: note = Description of Artificial Sequence: Synthetic polynucleotide
  source 1..516: mol_type = other DNA

SEQ ID NO: 2281 - protein, 172 aa, synthetic construct; identical to SEQ ID NO: 240
  REGION 1..172: note = Description of Artificial Sequence: Synthetic polypeptide

SEQ ID NO: 2282-2283 - skipped (2 entries)

SEQ ID NO: 2284 - DNA, 186 bp, synthetic construct; identical to SEQ ID NO: 255
  misc_feature 1..186: note = Description of Artificial Sequence: Synthetic polynucleotide
  source 1..186: mol_type = other DNA

SEQ ID NO: 2285 - protein, 62 aa, synthetic construct; identical to SEQ ID NO: 216
  REGION 1..62: note = Description of Artificial Sequence: Synthetic polypeptide

SEQ ID NO: 2286-2287 - skipped (2 entries)

SEQ ID NO: 2288 - DNA, 57 bp, synthetic construct; identical to SEQ ID NO: 1283
  misc_feature 1..57: note = Description of Artificial Sequence: Synthetic oligonucleotide
  source 1..57: mol_type = other DNA

SEQ ID NO: 2289 - protein, 19 aa, synthetic construct
  REGION 1..19: note = Description of Artificial Sequence: Synthetic peptide
ATNFSLLKQAGDVEENPGP

SEQ ID NO: 2290 - DNA, 15 bp, synthetic construct
  misc_feature 1..15: note = Description of Artificial Sequence: Synthetic oligonucleotide
  source 1..15: mol_type = other DNA
atgcatatgctggag

SEQ ID NO: 2291 - protein, 5 aa, synthetic construct
  REGION 1..5: note = Description of Artificial Sequence: Synthetic peptide
MHMLE

SEQ ID NO: 2292 - DNA, 321 bp, synthetic construct; identical to SEQ ID NO: 317
  misc_feature 1..321: note = Description of Artificial Sequence: Synthetic polynucleotide
  source 1..321: mol_type = other DNA

SEQ ID NO: 2293 - protein, 107 aa, synthetic construct; identical to SEQ ID NO: 3
  REGION 1..107: note = Description of Artificial Sequence: Synthetic polypeptide

SEQ ID NO: 2294 - DNA, 24 bp, synthetic construct
  misc_feature 1..24: note = Description of Artificial Sequence: Synthetic oligonucleotide
  source 1..24: mol_type = other DNA
tcaggcggtggctcaggtgtggac

SEQ ID NO: 2295 - protein, 8 aa, synthetic construct
  REGION 1..8: note = Description of Artificial Sequence: Synthetic peptide
SGGGSGVD

SEQ ID NO: 2296 - DNA, 858 bp, synthetic construct; identical to SEQ ID NO: 936
  misc_feature 1..858: note = Description of Artificial Sequence: Synthetic polynucleotide
  source 1..858: mol_type = other DNA

SEQ ID NO: 2297 - protein, 286 aa, synthetic construct; identical to SEQ ID NO: 937
  REGION 1..286: note = Description of Artificial Sequence: Synthetic polypeptide

SEQ ID NO: 2298 - DNA, 15 bp, synthetic construct
  misc_feature 1..15: note = Description of Artificial Sequence: Synthetic oligonucleotide
  source 1..15: mol_type = other DNA
ggatctggaccgcgg

SEQ ID NO: 2299 - protein, 5 aa, synthetic construct
  REGION 1..5: note = Description of Artificial Sequence: Synthetic peptide
GSGPR

SEQ ID NO: 2300 - DNA, 54 bp, synthetic construct; identical to SEQ ID NO: 138
  misc_feature 1..54: note = Description of Artificial Sequence: Synthetic oligonucleotide
  source 1..54: mol_type = other DNA

SEQ ID NO: 2301 - protein, 18 aa, synthetic construct
  REGION 1..18: note = Description of Artificial Sequence: Synthetic peptide
EGRGSLLTCGDVEENPGP

SEQ ID NO: 2302 - DNA, 12 bp, synthetic construct
  misc_feature 1..12: note = Description of Artificial Sequence: Synthetic oligonucleotide
  source 1..12: mol_type = other DNA
gcatgcgccacc

SEQ ID NO: 2303 - protein, 4 aa, synthetic construct
  REGION 1..4: note = Description of Artificial Sequence: Synthetic peptide
ACAT

SEQ ID NO: 2304 - DNA, 63 bp, synthetic construct; identical to SEQ ID NO: 448
  misc_feature 1..63: note = Description of Artificial Sequence: Synthetic oligonucleotide
  source 1..63: mol_type = other DNA

SEQ ID NO: 2305 - protein, 21 aa, synthetic construct
  REGION 1..21: note = Description of Artificial Sequence: Synthetic peptide
MEFGLSWLFLVAILKGVQCSR

SEQ ID NO: 2306 - DNA, 357 bp, synthetic construct; identical to SEQ ID NO: 168
  misc_feature 1..357: note = Description of Artificial Sequence: Synthetic polynucleotide
  source 1..357: mol_type = other DNA

SEQ ID NO: 2307 - protein, 119 aa, synthetic construct; identical to SEQ ID NO: 169
  REGION 1..119: note = Description of Artificial Sequence: Synthetic polypeptide

SEQ ID NO: 2308 - DNA, 45 bp, synthetic construct; identical to SEQ ID NO: 452
  misc_feature 1..45: note = Description of Artificial Sequence: Synthetic oligonucleotide
  source 1..45: mol_type = other DNA

SEQ ID NO: 2309 - protein, 15 aa, synthetic construct
  REGION 1..15: note = Description of Artificial Sequence: Synthetic peptide
GGGGSGGGGSGGGGS

SEQ ID NO: 2310 - DNA, 327 bp, synthetic construct; identical to SEQ ID NO: 164
  misc_feature 1..327: note = Description of Artificial Sequence: Synthetic polynucleotide
  source 1..327: mol_type = other DNA

SEQ ID NO: 2311 - protein, 112 aa, synthetic construct; identical to SEQ ID NO: 1008
  REGION 1..112: note = Description of Artificial Sequence: Synthetic polypeptide

SEQ ID NO: 2312-2313 - skipped (2 entries)

SEQ ID NO: 2314 - DNA, 48 bp, synthetic construct; identical to SEQ ID NO: 152
  misc_feature 1..48: note = Description of Artificial Sequence: Synthetic oligonucleotide
  source 1..48: mol_type = other DNA

SEQ ID NO: 2315 - protein, 16 aa, synthetic construct
  REGION 1..16: note = Description of Artificial Sequence: Synthetic peptide
ELPTQGTFSNVSTNVS

SEQ ID NO: 2316 - DNA, 336 bp, synthetic construct; identical to SEQ ID NO: 426
  misc_feature 1..336: note = Description of Artificial Sequence: Synthetic polynucleotide
  source 1..336: mol_type = other DNA

SEQ ID NO: 2317 - protein, 112 aa, synthetic construct; identical to SEQ ID NO: 161
  REGION 1..112: note = Description of Artificial Sequence: Synthetic polypeptide

SEQ ID NO: 2318 - DNA, 324 bp, synthetic construct
  misc_feature 1..324: note = Description of Artificial Sequence: Synthetic polynucleotide
  source 1..324: mol_type = other DNA
atgggcgtccaagtcgaaaccattagtcccggcgatggcagaacatttcctacaaggggacaaacatgtgtcgtccattatacaggcatgttggaggacggcaaaaagttcgacagtagtagagatcgcaataaacctttcaaattcatgttgggaaaacaagaagtcattaggggatgggaggagggcgtggctcaaatgtccgtcggccaacgcgctaagctcaccatcagccccgactacgcatacggcgctaccggacatcccggaattattccccctcacgctaccttggtgtttgacgtcgaactgttgaagctcgaa

SEQ ID NO: 2319 - protein, 108 aa, synthetic construct
  REGION 1..108: note = Description of Artificial Sequence: Synthetic polypeptide
MGVQVETISPGDGRTFPKRGQTCVVHYTGMLEDGKKFDSSRDRNKPFKFMLGKQEVIRGWEEGVAQMSVGQRAKLTISPDYAYGATGHPGIIPPHATLVFDVELLKLE

SEQ ID NO: 2320 - DNA, 27 bp, synthetic construct
  misc_feature 1..27: note = Description of Artificial Sequence: Synthetic oligonucleotide
  source 1..27: mol_type = other DNA
ggatcaggcggtggcagcggccaattg

SEQ ID NO: 2321 - protein, 9 aa, synthetic construct
  REGION 1..9: note = Description of Artificial Sequence: Synthetic peptide
GSGGGSGEL

SEQ ID NO: 2322 - DNA, 273 bp, synthetic construct; identical to SEQ ID NO: 2230
  misc_feature 1..273: note = Description of Artificial Sequence: Synthetic polynucleotide
  source 1..273: mol_type = other DNA

SEQ ID NO: 2323 - protein, 91 aa, synthetic construct; identical to SEQ ID NO: 2231
  REGION 1..91: note = Description of Artificial Sequence: Synthetic polypeptide

SEQ ID NO: 2324 - DNA, 15 bp, synthetic construct
  misc_feature 1..15: note = Description of Artificial Sequence: Synthetic oligonucleotide
  source 1..15: mol_type = other DNA
ggcagtggaggcggg

SEQ ID NO: 2325 - protein, 6 aa, synthetic construct
  REGION 1..6: note = Description of Artificial Sequence: Synthetic peptide
GSGGGM

SEQ ID NO: 2326 - DNA, 516 bp, synthetic construct; identical to SEQ ID NO: 251
  misc_feature 1..516: note = Description of Artificial Sequence: Synthetic polynucleotide
  source 1..516: mol_type = other DNA

SEQ ID NO: 2327 - protein, 172 aa, synthetic construct; identical to SEQ ID NO: 240
  REGION 1..172: note = Description of Artificial Sequence: Synthetic polypeptide

SEQ ID NO: 2328-2329 - skipped (2 entries)

SEQ ID NO: 2330 - DNA, 186 bp, synthetic construct; identical to SEQ ID NO: 255
  misc_feature 1..186: note = Description of Artificial Sequence: Synthetic polynucleotide
  source 1..186: mol_type = other DNA

SEQ ID NO: 2331 - protein, 62 aa, synthetic construct; identical to SEQ ID NO: 216
  REGION 1..62: note = Description of Artificial Sequence: Synthetic polypeptide

SEQ ID NO: 2332-2333 - skipped (2 entries)

SEQ ID NO: 2334 - DNA, 57 bp, synthetic construct; identical to SEQ ID NO: 1283
  misc_feature 1..57: note = Description of Artificial Sequence: Synthetic oligonucleotide
  source 1..57: mol_type = other DNA

SEQ ID NO: 2335 - protein, 19 aa, synthetic construct
  REGION 1..19: note = Description of Artificial Sequence: Synthetic peptide
ATNFSLLKQAGDVEENPGP

SEQ ID NO: 2336 - DNA, 15 bp, synthetic construct
  misc_feature 1..15: note = Description of Artificial Sequence: Synthetic oligonucleotide
  source 1..15: mol_type = other DNA
atgcatatgctggag

SEQ ID NO: 2337 - protein, 5 aa, synthetic construct
  REGION 1..5: note = Description of Artificial Sequence: Synthetic peptide
MHMLE

SEQ ID NO: 2338 - DNA, 321 bp, synthetic construct; identical to SEQ ID NO: 317
  misc_feature 1..321: note = Description of Artificial Sequence: Synthetic polynucleotide
  source 1..321: mol_type = other DNA

SEQ ID NO: 2339 - protein, 107 aa, synthetic construct; identical to SEQ ID NO: 3
  REGION 1..107: note = Description of Artificial Sequence: Synthetic polypeptide

SEQ ID NO: 2340 - DNA, 24 bp, synthetic construct
  misc_feature 1..24: note = Description of Artificial Sequence: Synthetic oligonucleotide
  source 1..24: mol_type = other DNA
tcaggcggtggctcaggtgtggac

SEQ ID NO: 2341 - protein, 8 aa, synthetic construct
  REGION 1..8: note = Description of Artificial Sequence: Synthetic peptide
SGGGSGVD

SEQ ID NO: 2342 - DNA, 858 bp, synthetic construct; identical to SEQ ID NO: 936
  misc_feature 1..858: note = Description of Artificial Sequence: Synthetic polynucleotide
  source 1..858: mol_type = other DNA

SEQ ID NO: 2343 - protein, 286 aa, synthetic construct; identical to SEQ ID NO: 937
  REGION 1..286: note = Description of Artificial Sequence: Synthetic polypeptide

SEQ ID NO: 2344 - DNA, 15 bp, synthetic construct
  misc_feature 1..15: note = Description of Artificial Sequence: Synthetic oligonucleotide
  source 1..15: mol_type = other DNA
ggatctggaccgcgg

SEQ ID NO: 2345 - protein, 5 aa, synthetic construct
  REGION 1..5: note = Description of Artificial Sequence: Synthetic peptide
GSGPR

SEQ ID NO: 2346 - DNA, 54 bp, synthetic construct; identical to SEQ ID NO: 138
  misc_feature 1..54: note = Description of Artificial Sequence: Synthetic oligonucleotide
  source 1..54: mol_type = other DNA

SEQ ID NO: 2347 - protein, 18 aa, synthetic construct
  REGION 1..18: note = Description of Artificial Sequence: Synthetic peptide
EGRGSLLTCGDVEENPGP

SEQ ID NO: 2348-2349 - skipped (2 entries)

SEQ ID NO: 2350 - DNA, 63 bp, synthetic construct; identical to SEQ ID NO: 142
  misc_feature 1..63: note = Description of Artificial Sequence: Synthetic oligonucleotide
  source 1..63: mol_type = other DNA

SEQ ID NO: 2351 - protein, 21 aa, synthetic construct
  REGION 1..21: note = Description of Artificial Sequence: Synthetic peptide
MEFGLSWLFLVAILKGVQCSR

SEQ ID NO: 2352 - DNA, 318 bp, synthetic construct; identical to SEQ ID NO: 1003
  misc_feature 1..318: note = Description of Artificial Sequence: Synthetic polynucleotide
  source 1..318: mol_type = other DNA

SEQ ID NO: 2353 - protein, 106 aa, synthetic construct; identical to SEQ ID NO: 1004
  REGION 1..106: note = Description of Artificial Sequence: Synthetic polypeptide

SEQ ID NO: 2354 - DNA, 24 bp, synthetic construct
  misc_feature 1..24: note = Description of Artificial Sequence: Synthetic oligonucleotide
  source 1..24: mol_type = other DNA
ggcggaggaagcggaggtgggggc

SEQ ID NO: 2355 - protein, 8 aa, synthetic construct
  REGION 1..8: note = Description of Artificial Sequence: Synthetic peptide
GGGSGGGG

SEQ ID NO: 2356 - DNA, 336 bp, synthetic construct; identical to SEQ ID NO: 1007
  misc_feature 1..336: note = Description of Artificial Sequence: Synthetic polynucleotide
  source 1..336: mol_type = other DNA

SEQ ID NO: 2357 - protein, 112 aa, synthetic construct; identical to SEQ ID NO: 1008
  REGION 1..112: note = Description of Artificial Sequence: Synthetic polypeptide

SEQ ID NO: 2358-2359 - skipped (2 entries)

SEQ ID NO: 2360 - DNA, 48 bp, synthetic construct; identical to SEQ ID NO: 152
  misc_feature 1..48: note = Description of Artificial Sequence: Synthetic oligonucleotide
  source 1..48: mol_type = other DNA

SEQ ID NO: 2361 - protein, 16 aa, synthetic construct
  REGION 1..16: note = Description of Artificial Sequence: Synthetic peptide
ELPTQGTFSNVSTNVS

SEQ ID NO: 2362 - DNA, 336 bp, synthetic construct; identical to SEQ ID NO: 426
  misc_feature 1..336: note = Description of Artificial Sequence: Synthetic polynucleotide
  source 1..336: mol_type = other DNA

SEQ ID NO: 2363 - protein, 112 aa, synthetic construct; identical to SEQ ID NO: 161
  REGION 1..112: note = Description of Artificial Sequence: Synthetic polypeptide

SEQ ID NO: 2364 - protein, 4 aa, synthetic construct
  REGION 1..4: note = Description of Artificial Sequence: Synthetic peptide
LEHD
